United States Patent Application Publication US 2026/0271966 A1 - sequence listing, part 9

SEQ ID NO: 51 - DNA, 2096256 bp, synthetic construct
  misc_feature 1..2096256: note = Based on Lactobacillus reuteri
  source 1..2096256: mol_type = other DNA
ggctaaatactccctagtgaccgatagtgaaccagtaccgtgagggaaaggtgaaaagcaccccggaaggggagtgaaatagttcctgaaaccatgtgcctacaagctgtcggagcccgttaatgggtgacggcgtgcctcttgcagaatgaaccggcgagttacgattgcatgcaaggttaaggtggaaaaaccggagccgtagcgaaagcgagtcttaaatgggcgtaaggagtatgtagttgtagacccgaaaccaggtgacctacccatgtccaggttgaaggtgcggtaaagcgcactggaggaccgaacccgtgtcagttgaaaatggctgggatgaggtgtgggtagcggtgaaattccaaacgaacttggagatagctggttctctccgaaatctctttagggggagccttgaggtaaagaatcgtggaggtagagctactgtttggacaaggggcccgtcatgggttaccaacttcagataaactccgaatgccattgatttatactcaggagtcagacgatgagtgataagatccactgtcgaaaggggaacagcccagatcaccagttaaggtccctaaatatatgctaagtggaaaaggatgtggagttgcatagacaactaggatgttggcttagaagcagccaccatttaaagagtgcgtaatagctcactagtcgagtgatcctgcgccgaaaatgtaccggggctaagcatattaccgaaactgtggatgtgcactatgtgcacgtgataggagagcgttctaagggcggcgaagtcagaccgtgaggactggtggagcgcttagaagtgagaatgccggtatgagtagcgaaagacaggtgagaatcctgtccaccgaatgactaaggtttcctggggaaggctcgtcctcccagggtaagtcgggacctaagccgaggccgagaggcgtaggcgatggataacaggttgagattcctgtaccagttaactgcgtttgacgatggagggacgcaggaggctaagcaaaccgtacgactggaagagtacggccaagcagtaagtcaggatgtgagtcaaatgtttacatccgtgttgacaagctgtgatggggagcgaaattaaagtagcgaagttgccgatgtcacactgccgagaaaagcttctaaggagtagttaactgcccgtaccgcaaaccgacacaggtagtcgaggagagaatcctaaggtgagcgagagaactctcgttaaggaactcggcaaaatgaccccgtaacttcgggagaaggggtgctggccgcaaggccagccgcagtgaataggcccaggcgactgtttatcaaaaacacaggtttctgcaaaatcgtaagatgaagtataggggctgacgcctgcccggtgctggaaggttaaaaggatgggttagcttcggcgaagctcagaattgaagccccagtaaacggcggccgtaactataacggtcctaaggtagcgaaattccttgtcgggtaagttccgacccgcacgaaaggcgtaacgatctgggcgctgtctcaacgagagactcggtgaaattgaaatccctgtgaagatgcagggtacccgcgacaggacggaaagaccccatggagctttactgtagcttgatattgagtgtttgtactgcttgtacaggataggtaggagccgtagaagtcgggacgctagtttcgacagaggcgctggtgggatactacccttgcaatatgaccactctaacccgcagcactgaacgtgctgggagacagtgtcaggtgggcagtttgactggggcggtcgcctcctaaaaggtaacggaggcgcccaaaggttcgctcagtatggttggaaatcatgcgcagagtgtaaaggcacaagcgagcttgactgcgagacagacaggtcgagcagggacgaaagtcgggcttagtgatccggtggttccgtgtggaagggccatcgctcaacggataaaagctaccctggggataacaggcttatctcccccaagagtccacatcgacggggaggtttggcacctcgatgtcggctcatcgcatcctggggctgtagtcggtcccaagggttgggctgttcgcccattaaagcggtacgcgagctgggttcagaacgtcgtgagacagttcggtccctatccgtcgcgggcgtaggaaatttgagaggacctgtccttagtacgagaggaccgggatggacataccgctggtgtaccagttgttccgccaggagcaccgctgggtagctatgtatggacgagataaacgctgaaagcatctaagtgtgaaactcgcctcgagatgagatttcccatttccttcgggaaagtaagacccctcagagatgatgaggtagataggatggaagtggaagtgccgtgaggcatggagcggaccattactaatcggtcgaggacttaaccaaggagcggtaaggtttattggaagagaatagataggatttagttttgagagcacaagctctcgtccgaagggacaaagagtgtggtgatgatggcttgaaggatacacctgtacccatgccgaacacagaagttaagcttcaacacgccgaaagtagttgggggatcgctccctgcaaggataggacgttgccgcgcagtagtaaaagggtgtgtatcgttttaacggtgcatgtcctttttttagtgcgcccggcatgggtattagctaggtggtgaaagtccgctatgggccgtagtagtcggaaccatgagctgaggacaagggtgtccaccgtgaggtggaatctgaaagaagtctaagggcaagcagtcaataacagtacggattgaaaaaattgggatcatgagctaccgaaaatgataattcatgatcccgttttatttatggcattctgcttgaatttcttttgaccatggcaaataagcctcaagtcctgcgtccttgcggtttggtaagtgatcaaaaagatacttaaagtatttgtagatatttaaatggttctggtttgcagttgccaccaaagtatagaaaatggcatttgcctgagctccagcagagcttttcgcaaataagctattctttcgaataagagttgatggacgaatcgcttgttcaaccggattattcgttaacggcactcgaccatcttcaaatatttgatatactcgctttcttagcttcaaagcattattaatggcagctttcaaccgtccttgaggaaaactgatattttctaaataagtatataacttatccatcaaaggcttcacgtgcaaccgacgttgcactagtttttccttatgattggaatatgttaattgtttctcttcatgaaagatcggtcgcattagctgtaaaactcggtatgctttggagttcttcaattgctccttattcaataaacatgtaatgtgataaaattcacgtcgaatatgaactaaacatgacccaaattttgcctggggatataatcgatcactatatccaccataaccgtcacacgtaataattccacgatattgatgaccgataatttgaccaatggttttacccgcgcgggtattatagtaatgaaacatgataatttgatgcttactgaattcttttgttgatcgcgttacccaaaagtagccagtttcattaggctcatcaattaccttgaatggagtttcatccatatgaattaccgattcttttctgattaattcctgtaaataatcatataacagttcaaggtaggtttgactaaccttaatgatgttagtcgccaataatcgagcatcaactcgtaagccgacggcttgccaaaacttaatttgacgatgaaacggtaaagcaagattaaacttcaactctgctactttagctaaaatagtactcgaaaagtaactatggggtaaaagactctgtggcatcttactactgacaagtacatcgctaccattagaattaatacactcattacatttataagtttcttgaatcaaattcacacaatataattcagctggttttaaccgtgcttctctactatatacatgttgacccacttttttcattagttgatgacagtgtgggcagttagtatcttttaatggaataacttcttcaacctgtggtaaaccatctaaaaaagtggtccgctgaccagatcgttttgctttccggtgacgcaccacttgctttattttttttcagtcacttccgtgactgaaatatcaggatcttgaagttgatccatttcttgctcactaaataaggattgttgtccatcaacgacgggctccattacttcagtttttttcccaaatatttggttcttttgaagtttgataatagctgttaattgagcaatcttttcattggccatagctaattgttgtttaagttctttgatttgttcttccgctgtttgcttcatggtacgtcacctcctttgaattattctttggtaattatatcaaagaattcttcttttaaatagaggtaactcaataaaaacttcctggtcgaacagcttgaattttacgaattggtaatgggttcagtccttgcaataaccagtcgagctgttgagcagataattctttggcttcattactgtttctcggccaactaaggtggccattttcaaaccgtttatagagcataataaagccctcgccatcccaaaacaatcctttaaagcgatcattacgtccgccgcaaaataagaaaagcgaattaaattctaatccatagttctcagcgattaccattgcgagcccatcaataccttttcgcatgtctgtttttccacagactagatagatataatctgggtcatgccaattaacgagcataacgaataaccattttaacgatatccgaagctaaaacagaattagtccccttgaaaatcgttaattcgacttcattcacattaatttttacggcagggcgtgccgtaaaagaatgcttttgtaaattacttggcttgtttttgaaaactggggtaataatttcattttgttctgtcataaataaaaaatctccttactgatgatagtctcagtatagaagatccggggtagctagagctagacgtactgttattgactgcttactataaaggccatcttagttgacccagaaatagtaataaaacagcaaaacactaagctataattgctcattgattacagctcagtgttttgatagttagactttattgactggtttttgtaaccaatgaaagaaaatagcgcgctgactattagctaataaccaccatccactagctaatgaaaaggccccgatcacatcggaagtaaaatgagctcgtaaataaactcgcgaatacataataataatgatccatagagcgccgacgattcctaagattaccctctgccacttaactttacaatagggtaaaaggagggctaggatcgtaaaaatgaaaatagcagttgaaaaggtatgcccacttgggaaactatatccactaacatcaattaaccgaaaggaaggacggagacgagtaacactatacttgatgaggataactaaacagtaaccaataaattgtaacatgccataccaaacactatcagttgctcttccgcgacgccataacaggagcattaagccgattgttataatgccgactgtaactgggtcacccataaaggttaattcggtcaggatagtagtcttaaacttagacactggggcagtcagatcaaagccacctgcatcgattaaacgaacaaatggagatttagttaaaacattaaagagtaatactccgaataaaatccaacaaaaaagtccgaatccgatttgtgcttttttatgcattatttataggcctcattcatattcattattacatttaattatatcccatttattcttaaaaagttatcctctctccacgaaaacgtttacatttaaaataaatgcgatacaataaaagtaaaaaagaggaaggacgattttaatgaataaccaattatgtggatatgcaattgttgatcaaaagattacgattaattatcaaaacagtgctattgttttatcagttattacgcctgaaatcattcgagtatttcaagatcacggtgaaaaaggaacatcatatgctattgaaggcaataaaacaattaaaactaattttacagtcttagatcatggtgaccatcttgaattaactacggcagcgttaattgtaaaaatatacgacaacgagaaaatgaatgtatatgacaaggagggtcatccattagttattgattatcagggtaagcgaacaccgattgaccgtggattagataaggctcatgcaaaattagttgctgccgaaggtcatgatattgctggtggaagtgaccaagataagacatattttgaagtaattaaatctttagccactgatgaacagatatatggtcttggtgataaaactgggtacttgaataaacgtggctacgaatacgataactggaatactgataatccagcacctcaagtagaaagttttacccggctttataaatctattcctttcatgttaggcttgaagaacggtcacccatacggtcttttctttgataatccttatcggagccatcttgatttaggaaaagaaaatgctaattactacttttattccgcagtcgccggtaaccttgattattacattatcggtggtccgcacttgagcgatattgttaaaaattatacttaccttactgggcgcgttccattgccacaaaaatgggtacttggttatcagcaatcgcgttggggatatagtgtaagtcctgaaaaagttcaagagattgcgactaaactacgagaaaatgatcttccttgtgacgtgatccactttgacattgactatatggatggttaccgagtatttacttggaacaaagaaaagtttactgatcctcaagcatttgtttcaaagttgagagaccaaggatttagagtaatgccgattattgaccccggtgttaagcaagataaaaagtataaaatttataaagaaggaattaagaaaggatactttgttaagaatcctgatgggaccgtttatgttaataaggtttggcctggcgatgctgttttccctgactttggccgagaagaggtacaacaatggtgggctgataattgtaaataccttgttgataccggaacagctggaatttgggacgatatgaacgaaccagcatcgtttgaaggtgaaatccctgataatattgtctttagtgacggaaaatccccttctacccataagaaattgcataatgtttatggacataatatggcaaaggctacttacaatggattaaagaaatacagtcataaacgaccttatgtcattactcgggctgcttatgcgggaacgcaaaagtattcaaccgtctggacaggtgataaccaaagtttgtggcctcatctacaaatgatgattcctcaattatgtaatttaggaatgagtggctttgcctttgcgggaactgatattggtggatttggtgcagatgccacggccgaaatgctaacacggtggattgaggcagccttatttagtcctctctatcgtaatcacgcttcaatgggaacccgtgaacaagaaccttgggtattcggtgaaccaacgctctcaatctaccggaagtatttaaagttaagatatcgttttattccattcttatacgatctttgttacaaggagacaaagaatgggctcggaataatgcgtccgttagtattaaactacgatcaggatcctactgttcggacaatgaacgatgaatatatggttggcgatgaattactagtagctccagtagttcaagaaggccaaaatacacgagcagtctacttgccagcaggggagtggattgacttttggaacggtgttgaatatgcaggtaagcggtcaattttagtagaagcgccaattgataagttaccactattcgttaaaaagaatacgattattccatggggccctgaagtaagtcatattagtgatgaacctaatgaaacaatgaccttccgcttatatggacaacatgcctcatatactcattaccaagataacggccttgactttgcttatcaaagtggtgaatacaacctttatcaaatcaaggcttctcaaaatagagtaacaatagatatggctcataatggttatgataaaaattaccggaagatctttgtagaattaaatgatcaaaaattaacatttgaatttaatccccaaacacaaacatatgtccaacaataatctgagatagaagataagaccgaggaagaagtttagtgctaattcttcggtcttattttagtttacataatattcaacatagtgagagattgttgttatctttttacattcatccgtgatacactggaagttgatttatttttatagtcatgtggtaataagtcaagatggaattaccactggcttgattgctttgaccagatttttggcgtacttaaataagccttggttccaaggtgattttaaaactaagcgtcaaaaatcattttatcttcctataccaattacctcttttcttgataaatttggtgatttttgagtaggaagtaaatcaccctgattaatttacgtgcggtaagaacgagggctcgtttagaaggagtgtgttttacttctttgtatttacgctgataatactcgccaaagactggatcgtgcgttcgaactaggttggcagcttcaaccaagtaataacgaagataggtattaccagtcctctttaacggtgtgttatcgctagtgtaacttcccgattgcttttctctccaggaaagcccagcatatttagctaatttagcttcgttgtcaaatcgatcgatttgaccaatttcagctaaaataccagctgcatagactggtccgataccgggaattgagcgcagaatttgttcatcatcagttactttaacgactttctcaattgatttatcgagatccttaatcatcttttgaaatgccttaatctcttcagcatagacagagagaaccgcgtcaaccgaattagctacgactttatctagccggtacgaagaccaaacagccttttgaatcgttttcgctaaagcttcggggtctgcgaagcgacctcgaccgtgttcagccaaatagtcggttaaatcattgattgaaatattgagtaagtcatcagtagtcagatcttcagttaataactgcatcatggttgaaccaaatatagaagtattaagttcatcagagataacaagcttattgagcttatagtataagttttcaataaagtgttgtttagctcgaaccaggctttgaacaatctcatatctagaacgggttaagcgctgaagagcaatgtaattttcttgacgaacaattccaatcgaataatgaccaacacgtaagtaatctgcaatgtaataagcatcaatttgatcatttttgtcttcagcgaaaacatcgtgaaaacgtttagttttcttgggatcaacgacgactgattgagtattaaaagctttcagatcaatgtcttcttgaaagaacattgctgggtgaaaactataaatgaaagtagcttccattccgataataacttggtcaatttgatttgaattcgccgtgttaataatctgtttctttaattcagttgcgcctttcaaatcattgacaaagttacctcggaaaacaacttcgtggttttcttcggaaatcattgaagtcacaagatcttttgagctaacgtcaataccgacaaatagtttcattggaatggcctcctttcattaaaatttactggtcttaatctgatcactgcatgataacccctaattacaatcgctaaagacatcctcgcaagtatcagtatttcattggttagcgaatcaaagctgcacctaatcctactcagaattagttgattcactaatcgatacagcatgtgagttcgtaaattagctgattgcctgggcggcagactaattaagtagttaaaactacaggagacgataacctataccagttgaccaacgccaatgatgattagaggttatcatgcagtgaccagaaagcaagtagtaaagtatcaaaatccgtaaggactgatttatataatacgaggagacgagaagatgaaagaaacgcaagagaacactccattagctgttgcaacggttgttcttggaatagtcgttggttttagctcattgatccttagcgctattctagatttaacagagcactattttttaaactttaacgagacaaataagattccagttaatattaatatttttcctcttcatcgatttgtctcagtgctaataggggggataattgctacaattatttggtactttcttcaacgtcattatcacccggttagtattaagaatgccctgaatggtaaagagatgccgttaagaaaaacatttattcacgtggttacccagatctttttcgtagggactgggaattccatcggtcgtgaattagccccacgagaagcaggggctgctatcgctcaggaatggtctcgaatgcttaattcttatcggtggttgcaccttaatgatgaggataaacgtttattaatcgccgctgctgctggagctggattcgcgggggtctatattgcacctattacaggaactgttttctgtttagaaattttatatcggcgcattaatgcccgttcagtttccgttagcttaatcatgtcagtaatcgcaacgatgattggttcgattttaaaaggattcgaaccatattatattgttgggagtcgagatttctctttgctatctgttccattagcaattgtgctaggattaatccttggagtaaccggaacctggtttaaacaaggagttaaagcagcttctagtaaacgggcaacaggtaaaaatattttctggcaattaccacttttatcgttctcggcaggagcaattgcagctttttatccacaaattatgggaaacgggcggggacttgctcaattagccatgaatacgaccaccgtcaattctcaggtcctaggagcgctcttgtttggtctagttgctaaagtaatagttaccttatttacaatcaaatgtgggggctatggaggaacactgacgccatcgattgccgctggagcagttattggagtatttctcggtattccttatatgcacttcttcccggttgttaccttaacgcagtgtgcagttattggggcctcattatttttagcagcgtcacagcaggcaccgttaatggcattatttatgttatttgaagtttgtcaccttaactttacagcttttcttccgttggggattggagtcgcaatttcaattggaatttcaaaatggatgcaggaagcaaaagcaaggacaaaataacctttagtaaaaacattctctaataaaatagcaaggctgaaatttcttccaaccttgctattttttatttatacaaattcttcattttctttacagttgctgcaagatccttgctatcaaagactaaggaaataacagctagccctgcaacgccagtgtcatgaacaactttcatattttcttcatcgatgcccccaattgcaactacaggacgttcgctaatcatgtttaaacgttcaagacgattgataccaatagcagcatcagcgtcaggctttgattttgtagggaaaacgggaccacaaccaatataatcaacaaagtccattgtattagcacgttcaacttgttctggtgtattacaggaatagccgatgaacatctgatgacctacagcgacagatacttgttcaattttagtatcattttgtccaacgtgaactccatcagcgtttatttgctgagccaattcataatcgtcatcaacaatcaatggaattccatagcgcgtacataaggtccgtagttctagtcctaagtctactcgttcattaggccgtaacttcgagtttcccttttctcgatattggaaggcagtgataccactcttcattgctagctctactttttcaagaaatttaacaacgtcattatggacatcttgtgttccaccaactaagtatacttgtaacatttttggatcaaacatcattttagatcgtctccttcaattttaacccagtgattaagtggcccatgaccatgaccaacattaatacccttgctaatcgtcttttcgacatatgtcttcccaatcataattgcctgttccatggagtgacccttagcaatttccgcagtaatacatgcagaaattgtatcaccagtcccatgagtatttttagtattaacacgaggcgcagttaaccacatatcattgccatcttcaaataaaatataatcatcagctttgtctgaagattctgcatggccaccttttatgagaatattttttgctccacgcttttgtaattcgcgggcagcctttttaatatcatttttatcccttattgtgattcccgtcaactcacaagcttctggaatgtttggcgtaatcagagaggcgagggggataagttcatctcttacaattgaaattgcatcatcactaagtaactttgcgcccccctttgctaccatgaccggatcgacaataagcggtcctaaatcatatttctttaaatttcgtacaaccgttcttacacggagagggtcagccaacatccccgttttacaagccctaattttcaaatcaccagcgattgaagcaaattgctcattaattaatttttcaggcattggcagggcatcttgcactcctaatgtattttgcgcagtgactgcgacaactaccattgctgagtatactccgcgcatttgcatcgtctttacatccgctggaataccggcaccaccgccactatcagttccagcaattgttaaagcctggggataatcattaatcaaggtaatcttcctcactttcctcaaagaattctagtaatgctttcgtatccataatcgaaagctggtcaaaaaactgtacttgccacgaaccgagtccgactgaataacggttagctaatactccagcagcagataccaaaaccgttgcaacaatacaagcatcccaagtattagaagtgatccctagaaatgcagcgatgatactagaaagcatgtcgccactacccacattcatcgttaacatctcggcagaaaagggattttcatagatgacttgcccatcagttattatgtcagtttcactagtcaagactacaattgaatggtaacgtcgagcacacgttttggcaatttgaacctgattaggaactttaccagcgtcgattccatgactagtattgtcagcttctactaaagcagcaatttcactggcgttaccacgaataacatcaaaatgaaaatcatttagcaatgagtgggcaaactctaagcgagatggaatcgcacttaccgctaccggatctaaaacgaggggtttgagtggcgtggcagctcgcaaaaccgtcctaatttgtgtcgcctgatgctcattgattgttccgagattgatagaaagagcattggctagtgccaccatctcatctgcttcagtgggctcaacagacatgattggcgacgcgccgacagcactaacggcatcggcaactttatcaattgttactaaattggcgagattaaggacaatcgggtttttagtacgaactcgatcgatcagtgaccagttaatttgacgttgtaccataaaattagctccttaaataaaaaatactcaaggtaggagatacacctactttgagtattaaagtccggtgcattttcctacgcaagcgttaacttacaggttctagagtccatgcatcactgcatatctcagcccagcactatgggcacccctaatgcaataaatttagtataccgcaaattattctttatgaatattaataaagataattggcaaaatgggaatgataattgtaaaatgtaataaaccgcgttattagaaaacctacgggtaaaatgaattgatataggcttttttgacatcatatattcttagagaatgctataaaataaccaattagttaaaatgttaactccattcttaaatgataatacgtttaccccaaaaataaatttagagtatttgaatacagttcatatactccttcgaccgtactaaataacttgtaatatgcgtataaaataattgttagttttaatataaagtagtttatgattaatagcgctacattaacaaaattactttcggtaaagttacattctaaattgatttttatttatagttgataaaaagaggtctaaatttcattagggaagttttttaatggatttgaaggtactccatcaaaaattacttcgtgaatacttgttttatttgattatttataataaagctcgttattagagattcgaatcatcatatgatttgaatttatgggtggttttttaataaaagttcgaatatagagagttgtatatatgtttagagattaatattgctttgtgaacataattgtcggcttagtaacaaatagatgatgacacccctcacacaaatgtgaagggtgtcttttaataataagtatataaaaaatcggctctctaataattatcgatcatatattgtttattgaaaacgtacatcttcttctttgccaacttcttcgtcaaaataacctaatccatttacttcgagtgtttttagataagctaccaattcaattgcggaactaggacttaattcgtttactgcattcaaaccaagaccagttggaacagtttcgctcattgctgtaatttggttatcattctcaatatgaacttgtgagcaactaattgcccaacgattattgacgtttggagcaaaaataaagaagaggttgaaatcggctgaaagatatgccggtaagaaccaggcaatgttatctaatcgttctgggttgaggttaccttgaagcgcaaaacggttgatattttcttcacaagggattgctttgagcataaacatggtattttcaaactctctcatccctaatttcatttccggtgtaattttgggcttcatatcatctaaaatctcctaactaaagttttcacggtagtagttatacttatttcttatatcttggagcggggcgtccatcacgtgcattttcccatgggcatcaagcttgaaattgtttgcgattacctgattgaactgcaggcggagacgaggatattggatgaggattttctcaatgttagttgacataatatcaagagcggcaagatatttggggacaagaattttcttaaattcgttaaacgtatctgcaatcacctcagcataggcatggtcagcatatttcagttcgttttcctctaatttatcgtaatactccctgcttgtcaggccacgttcatttttaatgttgtattgctcatcgtattggtgggtaagataagaatcccagtcacgatagcaataagtaatcatttggattactaattggcgtccctcgtaattaacgtttttcggaatcatctttccctgtggatttaacaagtaaggtcggattagctgtcgcgttacaatatcataaaaggttcctggcacaagttccttatcttgactatcctcatataaatctccggaaccttcaagcttttttagtttacggagactttcacgagtttggttggcggcataaataacatcttcaatctcttgatcaattatttcacgtttactaatcttttgtaagaggtttgtgtagagccggattaaattatggagttcagactgctgattagggtagaaaccgttttgttgctgatattttctagtttcccgttccaattgttgctcaattgcaagggcctgatgctcaattttaacaggcaagactggttgcgaaaagctatctttagcaagctgctgaactgcttcacggatgattggtctcatttcacgaaaatccggaaaatcaaagaaattttgaaaatcattagcaaagtttaggtgtttatatactgctgatttaagatttcgcttcataaaatattcctccattttctttgattttaatacgaaaaagagtaagaaaatattagggaattagataaaaacccttattttatttgtatttaactcgcctataattaaatataaataaaatagaggagactataatgaaaaaattattgaagcttttagcaatctttttactgtttagtagtattattagcagttcggcgatggctagttcaacaagaaccataacggatatgacaggggagaaaataaagatcccaaagaaagttaaccgcgttgctgacttatggcatgctaataatcaggttgtgctgttattaggaggacaaaataagctagttgccactactcctcttgttaagaaacaacattggttcacaatggtagatccaaaaattgctaaagttgctgcgccattagcaggcaatcaaattcaagttgaagaattagtaaaaataaaaccggacgttgtaattgcttccgatcaagctcaaataaaggaatcccgtcaagcaaaattaccaacagttaacgcaatgtatactgattttgctgggttaaagaagtcggttacattaactgcagaaattttagggggaaattctccaaagattgctcggcaatacaataaagaattaacaaacaacattaatcttgttaagcagcatttgaagagccgaaaatcaacgccaacggttcttcatattgttaatgcaacagatcttaccaaggttgacggacaaaaaacaattgttaacgaatggattaaactagcaggtggaaagaatgctatttctaaaaagggaaatcaaatttcagttacgcctgaagaattgattaaagcgaatccagatgtaattatcgttggtagtacatctactgcccaagcgcgaaaagcgttacgtgctaacagtcagctaagtcaattgaaggctgtatgcgaaaacaaagtatacggaaatcctcaagggaccttcccatgggatcgttatagtgcagaagaagcacttcaagtcttatgggcagctaagactcttcatccccaagaaatgaagaatattaacatggtctctgaagttcaaaaattttatcaaaaatactaccactacaatttaacagttaaacaagcaaagcaaattttagctggtgaaaattagcataaaaaacatcccctaaactggatattaattatccaaagcaaggggatgtttttaattagagcttaatttgacaagtatatcgttgaagatcaggtagataagtaagagttagtggaacatgatagatcctttctagctgtttagttgacattaactcttcacatgatccagtaaccatggaaccttttgaatcaagaagaccgattgtagtcggtagcattaaagcatggtctggaaggtgagtagtaagaataatggtgattttttgctgggctaagtcttgaattagttttaatatttcgtactgtcgacttaaatcaagggcagccataggttcatcgagaattaacaagcgcggttcttgaagtagggctcgaataatcgtaattagttgctgttgaccaccgcttaatgagataaaggggtgatcacgaaaaggtgaaagatgaaaacgttgtaaataggtttcagcaagttgaacgtctttctgatgcggagtttggagaaaagaaaggtaaggtgcacgaccagttaataaataatcaagtactgtgagattggaattaatatgataatcctgaggaacataggcaacttgttgtgcaagcgttttgtgcttcaaatttccaagctcttttccgttaactattacggttccttcatttggtgtcaaaagtccgactaaacagtggagaagagttgattttccgacaccgttagggccaaggatagtaaatacttctccagcttcgagactaaagttaacgttgtgaaagaccggatgtgtttttgaataggcaaaactaaggttattaacttcgaggactttcaatttaattgcaccttcttcttaattagaatataaacaaataagggtgcgccgatgaagccagttaggatacttaacgggatttcccctgccgatagggatcgagccattgtatcgacaattaacaaaaatagcgcaccaataactgctgcaaggggaagggtttcttttgtattatccccaactaaaagtcgagcaatatgcggaattacaagtccaatccagccaatatttccgctaagacaaactgttgcagcggttaaaaacgtgctggcggtaattatcagtagttgttccatatccacattaattccttctaggcgcgcttgttggttgccaagtgaaagaattgtcatatgccagcgaaggacaaatagaattattgtacctacaagcaaaaagggaaggacagcgataatatttgaaaaatcaacttttgctaaactgcctagttgccagtagacaatactttgtaattgtgaatccggatcagcaatgtactttagtaatccaactaatgcctgcataaaaccagaaatcacaattccggctaatactagaattaaggttccgcgctgatgaaggatttgggcaatcaataaagttaaactgaccgcaataattccaccaacaaaagcaaaaagctgagtaagtccaatgccatagcctaagagaattgcactagcagccccggcggccgaaccatacgacacccctaaaatatcaggcgagaccaaaggattatgaaaaacactctggaaagaacaaccagccattgctagaccagcaccaattaacagcgcaccgatgattctaggaagacgaaggctaaaaataatgtttgctgcggctggattgctttggggatgaagtagcgtttgaaagattatgattggtgaataatagatccgcccacaagaaagagcgagaacgattgtaacaataaccaacaaaattgcagtaaaaagtgttagatgataatgatgcttagtaattagaatctcttccttttcttaagaaattagtgatttcatcagtaactgtttgctgagcggttggcaggtcttcatagtcgatttttaatgaagacgctaatggtgaagcaccatgttgacgcaattggtaattaaaaatatttactgcgttagcaaattttgctggaccaaaatttttatctcctacacctgcaatataataaaccagcctcgggacagaaaactgacaaagataattatagaacttttcttcagaggctgtgagttgtccttcgccataagtacagggacaaaggataagcaagtcaatactatccaattttacttgtaaggcctccttaaaagaaagaaaaatggcagacggaaggatagtttggtgaataaagtttcctaattcgaagttatgaccgtagagtgtatcgtagagaattaaagtattcattgattaatcgtcctttcattcaggtgctagtataacaagtctcttaaaatcctattattagggatttgactaattctaaagggccattatcgtgtgtaataataagcatgataaaggcgggtgattattgttgcattatttacgaataagcgatgagcccatcgatgtaagtgagatgtataaacagcttgttgctccagaatacggaggaattgatatgtttgtcggcactgttcgtcaatggactggcgagatcgagactactaagattgagtattcagcttatcatcccatggcggaaaaacaattagaaaaaattgcagcaccgattgaagaacaaggaggacgcgttgttgtcgctcaccggactggcgaattgacgcttactgatatcgcggtatttgtaggtgtggcggctccgcatcgtgcagaagcattcaaatggtgccaacatgtgattgatacacttaagcatgaagtaccaatctggaaaaaggaatatgatacagataaggtaaggtggggaaactaatggaaattaacgttaaattatttgcgtttttacaagatcagttaggaccatctattactcttgatgttgctaatcctattcgagtagatgaccttcttaagcaaattagccagcgggcaccacaactgacgtcaactttagcaaattcgcggatagcaattaatcaagaatttgttaacgcagatataattaccttagaggccgatgatgaaatcgcaatcattccgccggttagtggtggctagattactctagaagatagttagaattacataggaggaggacttgattatgtcaagtgttaaagatgttgctcatgggagtaggcgaaatgcttatactgcattgatcctctccacgcttgcaatgattgtttgttttatgtcgtggtctaactttgcgccacttgcatcccaaattgctgagatgttcaatttggatgtatcgcagcgaacgttgttattagcgacaccagtccttttgggatcaattatgcgaattccagtagggatcttaagtgatcgttacggcgggaaaaaggtttatttgatcttaatggcctttattttgattccactaattatgattccacatgttcattcatttggaatgttgctctttgccgcattgcttgttgggatgtcaggaacatcatttgccgttggggtttcttatgcttcagtttggtttccgccagaacagcaaggactagccctgggaatcgtttcaatggggaatatggggaatgctgtggctgccatgactttaccttatatttccaaggcagcgggatttgatagtgtttactactttttgattattcttacagtgatctttggtgttcttttcgcagttttttgtaaagaaatgccagttgataaaagtaaaacgattaagggcgcattgtctgttgccgcggacagtggaacatggtatctatcactattttacttcttgacttttggcttatttgttgcatttacaaacttaacgccaacattcttgacagggatgtttcattatactcctgttactgccggcctttattcagcattatttgctttcgtatgtacgttagttcgtccatttggtggttaccttgctgatagaaaacgccccatggcattattacaatgggtctttgtagcaatcgttatttttgctatttggattatgcttagttttcacaatcaattcatgtttatcgcagggattgttttggttggtctttctgcagggattggtaacggggttgtcttcaaaatggttccatatgtatcccaaggtaatacgggagcggttactggtttcgttggagcagttggtggcttaggaggtttctttccaccactaattattggttatatttaccaatggacaggtagttatgagcttggaattgcactcttagcgttaaccggtgtaatttgctggtttgctctatggaaacattacattcatggtgatgttcacatcgttaaataatacattgaaaaaatggagatgagggtaatttttccctaatctccatttttagttttaaattattctttttttaatttttcaactaatcgaaacaattcatcctgagtttggccagctggtaacactttaatatcaaggattagctgggagaagatatcatcaattagttgcttgacatcatcaattcgttcaagtgctaattgatgggcttgcttaaacatcgcttgtgaaggacgatgatctgaagcgaagaaatcactaaaccattgtggattctgttggcgcgcgaataaaagtgccaggggatactgaccactcgttatcatctttacaaatgagtcgggatcattactgagttgttgaaactcatatgtaatataactagcagtaccaaaggcttgaccaatctgtcctgcaagtgaaacaatttccctttttgctccgctaaggacggcactttgttttgcagtcattgttccaagtaatccccatcgtgctttaacatctgctaaatagtcagctaccttaaattgctgattatagttaaactgtagccgtcgaatctgtgcaagcatcacatctccagcgtcagttgtcaactcctcaattatttgtggaggattacctacagtacttagtgaacggacaaagcgattcattaagtagctcgcaacatatgaataagctttttgactagcgaatttcccaggagttaggttatttggctgaaaagaaggaggattcaaatgagttgctaatgccaatagttctggtagttgagcagctgtaatttgatcaattgtgagatctttttcgttgaaataactaaaagcctcaaaaagcgacaaccttagccgccgttcttcttcaccagtactcaagttaatcatttcgcgaaccattggtggatattgataaataacggttgttaatgcatctaccaaccgttcatctggcgttaaattcacagtatcagtccttaaatttatttacttcagcaattatttgttcagcaacggggatgaagatatcactgaaatactcattaaaatcaacattttttacttgcttctcagtaaattcttgtgcacggtgaaaagcatcattacgcatattaacgataagagcttctcgttgatgtttaagtcgcttatgtagcttctcgttgtcattgctcatgtagaaatagtaataaatttcgtagaaggtattatcaagaacccaaaagagggtgctccgtcgaatattatcgcttatcatttcagtaaaggaatttttaccaagaagctcatggttagcaaaggctcccgcagataatacgattgcttgaacttcatgcatatcagccatatagtggcagaattgattaatttcattttctggaacactaaatcccagcttttcttttcgttccgcctcagtcatcttagaaaaagtgatctgatactcttgcatcacattctgattatctgcaatcaaatccttttcgataatcgttagtaaagcaaaattatcttgcataaattccttaacagtttgccatattttttcaatttgttcattaaagtttgtgaaaagatcttgaacggtgcctattctttttttaaccacttcttttttctctacatgaggggcatattgaattagaagaggaatatcatcgttatgttcatctagaccgtgcttggaccgttgctcattttcataatttttaagttcatcaagatcaacaaggccgaggggcattacattaatttcaccatttgtaagcatgatttgtaaggcaaacggggtggttgtttcttgattctcgactaatgattttaaggcatcaaataattttctacgatttgcaagttcattatctggatctgcgtaaaagcctgcagtatagatcgatttattttcgtaatctcgttttagcttatcttgaatatccatcttaattaattctcctttgttgattgagcaagaagttgtgcaagcttattacggccgcgatcagttaaagcagcatcttttaaatttatctctgctaatgttgaactaaatgattcgtcaataactgctccagaaatatattggttttcaactgcatatttagttgttaaaaacaggttggaaacgggattaacttgtcgactattagtaaaacgtttgcgagcaatatcactaagaattcctcgtaattcatcatctcgactgaggtttgtcgccattaggaatccactcctttaatcgtattttctttattgtagaaaaacatcgacgtaaataaaatcggggattcttcctaattaagaatccccgcctagttaaaggtcaattaaatggtgatgaatagcatattgtactagttcaacccgtccatgtaagtgaagtttgcgtgaaatatttgctttatgggcttccactgtctttgttgaaataaacatcttttgtgagatctctttatttgaataccctaaagcaataagtggaaagacttctttctccctttttgaaagactattatagccctttaattttaaggtattaccagatgcatttatttctctaatatctgtcttactaacaatgatatttgcatcaagatatttctcgccatttataacatgttttagggcattaacaatttcgctatctggtgaacttttcaaaatataagacattgcgccatttgccattgccttgttgatatattcctgttcttcatgcatcgagagaatgataattttaactttgggaaacttatcatggattcgacgagtagtaattaggccattttcgccagggggcatacttaaatccataattaagatatcaattccgccttgttcaactcgaatatatgtatcagttccactcgctgtcccatcaaccaccgtaaaattcggttgaagatcgactaagtatgaaattcctgagcgaacaattgcgtggtcgtctgcaactaaaacgttatacatttgttctcaccatatccttatttaaagcattattatagggaaactttaccttgactgtcgttcccttattaatttttgatgtaattgtaaaggctccgttatatgccttaacgcgttcattcatattcattaatccaagtgaatgcccattaaatccactatgctgatcaatatcaaatccaattccattatcaagaatctctaactgaaggtaactattgtgatccgtaacaataatacttatttctgttgaatgagcatgtttaattgcgttattaattgcctcttgtgtaatgcggtaaagaacgttttgaatgtttttttgtaatttttcagcagaggtaagggctataacatcaattgtgattcctgtactattttgaagacgtttcgccaaagctttgattgccggaattaagccaaaattgtcaagaactgaggggcgaatatcaagtgcgagccctttaatctctttaagggtcgtttgtaattgcttttcgattgcagcactcattgattgaaattgctcagtatttcgttgcttttgcaccgttgctaatctttgaacgcccattattgcggcgtagattccctgtgcaacactatcgtgaagatcttgtgagattttttgccgttccttttcgtgtgcttcattgacatattgattgagaattcggtgctcttcaatctgcgaaaggcgttgctgttgctcacgattttcaagagtcagggcaaagacactttctttatcgtcaagaggacgataaaccattgaaaaatgaaaaggatgagtagcgttggagtgaaacgttatcggaacggtagctcccgttaaccgctttttaatcaagcatgaagcacaatcatcattttctagttgtgaccaagcgtttttaccaatttgcagtaggtaattaacatctaaattaagcatagttactaaccgctgagccggctcattactaactaaaagatcatcatttttaaataagaagattgcatctggtgattgattaaaatatttttgtatccaattagcagtttcaagcacgatctgcttcctccccaattaattgtctttataatattcctattttatataataacgttttctcgagttagaagcaacgctggcccacttaaaaggcagggctaagaaaagctctgcttctttagccctgccgtctgagttttaaggatgtcgtggtaatcccatcgatggtccctggaaatacttagttgcactaaaatcaaatttcggatcctgaaattcgcggtaatgatcaaaatcagcttgaatctgttgaatttggtcgtccagttgttctaactccgcatctttttccagcgaactcatttgttggcttacttcttgttcccgattttctagcattgttcgtctaattgttaagtcatttaaaacaagggaaatgagcttttgaaaatcaggatttgtcattgaatctttacttttcatttaaatcgacctcacgatagtttaaatttgaaaattcgttacttgagcgatacttaaggggtggcagacgcacttattagtgatgaaactacgtaatcgccagtcatcattattatcaacccaagtagtaacttgttcattgctaactgaaaaatgagctaatgaatagtgattgtgctgacttgttgcaatataagagttggacgtacgagcaagaacagcaagtacatcttttgtgatatatggataatcaacagccaaagttaaatagtcttgaacaacggaaaattgactagtacaagcaataattgctgaaaggggaccatgatgatcataaggggaaatatcacagataatctgcacagccggttcttgaccaaccaactttaatatatgcgctcgatttatttcattagcacaaacaacgatttgctgacaaaagggtgttaatttctcgactgctagctctatattggtagctggtaatcctggaacatgataagtagctttatctttcccaaaacgggtagatttaccaccagcatatactaatccaatcatcctgcatccccctttacttgttttaagtagtcatagcaccaatttacaattgcatcttttcctaataagtcagcggttgttccattaaagatactacctattttaagagggggagtatgagcaacattggtaggatcttcgccaggctttaataataaaatttgcggatattgagtggcttccttatgaccttcaatcaagacaaaatcattatcggtacttaataattcaaccatttccgttaaagacggaacattacttttttgatgaaagaaaaattcagtcgcagattgtaaaataacctgtttagctccagcactactcattctagcactgtcagtagttggcacatccattgcggcattatgggcatcatgtttaagagcagctactcgatacccttcttttgagagcctttcgattaaagtcgtcgtgataagagtcttgccgctttttttatgaccgattatttgaagggtaatagccatgcgtctgtctccgttccgaccttcattggagtagtactatgcggaatcagtgctaaacaggttgtcgtctggaggttagctaatgagccagatctgttgattccatttggataaacataaaattgattatctttgaattcataagtacaacgaagataccgatcaaagccgttagttttattatatggggccgctaatattgcccgtacttgcttaattcggctggcttggtgttgataacggcgaatcagcggttccatataaaggtaaaaaccagtaaaacaagctcctggattcccagaaagagccattattaacgtattattttgaacaaaggcagtcgtaacgcttcctggtcgttgtttaatcttattaaaaagcaattcatcagctttacgtgcttcatctccaataaaatcaaaatcaccaactgaaacaccaccatcagtaattacaatttcatgagttgctatttgttcttcaagagtctgcttgataagatcagcatcatctggtaattgggtttcaaaatcaacaatcccaccagtttcttctaccagattttttaacataataccattactattaaagatctttcccggttcaatcgtggcattaggtcctaataattcagttccagtggcgataattgcaatccgtggttttttataaactgttacttcttgaacaccaaaagccgttaaaactgctaggccaccgggatttatttcctggtcttttgctaaaacgatatcaccgctttttacatcagtaccagcttccgtaatgttagtcttgctttcagtcgtaataatttgaaccttattttcatctttagcgggccgcgttttttcaattcgaattacttttcctacatcaaaagggacatatgcaccagtcataattcggaccgcatcccctgattgtaatggttgatcccaagttgctccagcttgaatctctcctcggacgttaaattcgcgagggaagtcatgatcatcgctggctaaaatggcataaccatccattccagcccgtcgaaaatgaggataatcataattggcatgaacatctttagctaaaacacggtggtcagcttctgataacgggattgtctctgtagctgttttaaggggaatttcgttaatctttttctgtgcctcggcaacagagattggaattcttctagtgagcatggtgatgaacttcctttcgttgagaactgctttcaaataataaatgttcatattctggcaaaattagtttacttagagccgtttgacaggcattctgggaaccaggtaaacaataggtaagctgattgcggaaattaaatccggctagggcttgtgatgcaagcgcacgagtaccaatttcatcaaaagatatctggcgaaacgcttccccaaaacccggaattagacgtttgaggagtggacggatagccggaatagtaacatcacgctgagcaattcctgttccaccattagtaatgatgatatcaagagcttgttgttctagttgaaggtaggcagtttgaatattgacaatatcatcattaacgattacccgatcaactactgataagcccgcgttagccatctttatagcaattaattttccagaagtatcgctatctaatgttcggctatcgctaaccgttaaaattgcgatttttttcataataggtcttctttcatcaaaatatttaacgacttaaactgtttctgggcaatcgccgaagtaggtaagtcatacataacaatcttaccattcttgaatatacttactggacgattttcccatttaaaatgaagaaacaatcgatttgcgttgattaagagctcttttttagccaaaaattctttaagtctgccaaaattaataggtttctctttgatcgtataatatgcattttccccacataatatatgtaattctggtgctgattcttcttctaaagaaatactgcttggcttagcacaggcgggacaatggtaatttttattaatagcaaacttactaaattgcattgaccaattgtcaaccgcgatcaattcattaaaattaacctgtgttttgtcaaccagataatgaagcgctaaagatacctgtagtcccgccacaatcgggattaaagcagtattaaccccaattaaatcacaatcgttttgttttaattcattaatattaggaaaaagacagttcaagcagggatgattttgtggcgaaatcgccattacgttcccataggttcctgcacagctggcaaacagataatcaaagtttttgatgattgctaatttgtttaatagatcccgtgcttgataattatcaagacagtctaaacaaagggtaaactgatattcgtcaataaggtcagcagtaatcggcgctgggatcgcagtaatttgacatactgaattaattttatgtaaatgttctttagctgcttctaccttaagccgttgttggctagcatcttcttcggtgaaaagcgattgacgttgaagattagttacgtcaacagtgtcaggatcaatcaagataagtcttttaactccagcacggacaagttgctcggctgtataacttcccaatgcccctacaccgacaatcataatagttgcatggctaattttttgctgaccaatactaccaatttgatgtaccctttcttgacgatcataacgattcatggatattagcacctcatttagttcaaaatataggtatttccctagtcgtagtatagcagttatggtgctaatctttacattagggaaaagacttactttatttttaatattggtaagccattcaataaaggaggtcaatcaacgatgaagtcacggttctttaacaaggttgataagtttaatggaacctttacacaacttgaagaaaatagtcgtcgttgggaaaagctttatcgccagcgatgggcgcatgacaaagttgtccgaacaactcatggagttaactgtacaggctcgtgttcttggaatgtttatgtcaagcaaggaattattacttgggaacaccaagccacagattatccatcatgcggacctaatattccaggatatgaaccacggggatgtcctcggggagctagtttctcttggtatgaatacagtcccgttcgaattaagtatccatatattcgtggcaagttatgggagctttggactgctgccaagaaagaacatgaaaatcccttagatgcgtgggcaagtattgtcgaagatccagaaaagtctaaaaaatataagaaggtccgaggacacggtggcttaattcgtgttcatcgttatgaagcattagaaatgatttcagctgcttgcttatacacaattaagaagtatgggcctgaccgcattggtggttttaccccaattcctgcaatgtcaatgatgagttttagtgccggagcacggttcattgccttaatgggtggggaacaaatgagtttctacgattggtatgctgatctaccacctgcatctcctcagatttggggtgaacagactgatgttccagaatccgcagaatggtataacagttcttacattattatgtggggatcaaacgtcccattaactcggacgccggatgcgcacttcatgacagaggttaggtacaaaggaacaaagattgtggcagttagccctgattatgctgaaaatgtgaaatttgctgatgattggcttgcaccagaaccaggtagtgattctgctgttgctcaagcgatgacttatgtaattttagatgaattctaccaaaagcacccagttaaacgtttcattgattactccaagcgatttactgatttaccatttatggttgaattggaaccaagtacagcaaatggtgatcactatacaccaggtcgcttcgtccggattagtgacttagttgctgatgatacgattgtcaatccagcatggaagacagttgtttatgaccaaaataaccacaagattgttgttccaaatggaacgatgggacaagaatataatgctaaggaaaaatggaatcttgaattattagaccaaaatggtaataagattgatccggcactttctattaatgatcaagatggcgaaactgaacaaattattgctgattttccagcgtttagtaatgacggaaacagcgttgtgcaacgtcatttaccagttaaaaagctcaaattcacagatggcaaagaacacttggtaactaatgtttatgatctgatgatggctcaaatgggaattaatcggactggtaatgatgaacttgctgctaaagatgcaatggatgctgagagttactttactcctgcttggcaagaaagccgttcgggagtaaaagcagagcaagttattcaaattgctcgtgaatttgcccaaaacgcggccgaaaatgaagggcggagtatggtaatcatgggtggtggagtcaaccactggttcaatgccgatatgaactatcgaaacattattaatatgctgatgttgtgtggttgtgttggtatgactggtggtggttgggctcactacgttggtcaagaaaagctccgtccacaagagggttgggcaaatattacttttgctaatgactgggaaaaaggtagtgcccgtcaaatgcaaggtactacttggtattactttgcaactgatcaatggcgttatgaagaaattgataaccaagctcaaaaatcacctgtttggaagagtaaacattcctacttacataatgctgattataatcaaatggcaattcgtttaggatggttaccatcatacccacaatttgatcgtaatccgttatcttttgcaaaagattacaatacaactgatattaatgaaatttcaaagaaagttgtcgatgaattgaagaagggctctttacattttgctgctgaagatcctgatgctaaccaaaatcaacctaaagcgttcttcttatggcgttcaaacttatttgcttcttctggcaaaggtgccgaatactttatgaaacatttattaggcgctgaaaatggattgcttgctaaacctaatgatcgagttaagccccaggatatgatttggcgtgataaaggagcaattggtaagttagatcttgttgttgatatggacttccgaatggtttcaacaccaatgtactccgatgttgtcctaccagctgctacttggtatgaaaagaaggacctttcatcaactgatatgcatccatttattcacccatttaatgcagcagttagtccaatgtgggaatcaaagtctgactggcaacaattcaagctcttagcaaaaactgtttctgaaatggcaaagaaatacatgccgggaaccttctatgatcttaagagcgcaccactaggacataatactcaaggggaaatcgctcaaccatacggggaaattaaagattggaagaatggtgaaactgaaccaattccaggaaaaacaatgccttccttgaaattagttactcgtgattacaccaagatttacgataaattcattacccttggacctaatatagtgaataactatggctataaagtcgatgatcaatatgattatttaaaggaaataaatggaactgccagcgaaggcattggtgcaggctgtccgttacttgatgaagatgaaaaagtatgtgatgcaatcttacggatgtcaactgcttccaatggtaaactcgctgaccgagcctgggaaaagaagcaagagcgaacgggtgaatatttaacagatattggccgtggtcatgctgatgattcaatgtcatttaagcaaatcactgctcaaccacaagaagcctatccaacaccaatcggaacttctgctaaacatggtggggctcgctacacaccattctcattaatgactgagcgaaatattcctacatttactcttacaggtcgtcagcatttctacattgatcatgaaattttccgtgaatttggtgaaaatatggcaacttataaaccatccttaccaccagttgtaatggccccaggagatattgatgttccaccagtaaaagatgaagttacacttaaatatatgactcctcatggtaaatggaatattcatacgatgtactacgataaccttgaaatgttgacattattccggggtggtccaactatttggattagtccccaagatgccgataagattaaggtaaaagataacgactggatcgaagtttataaccgtaatggggttgttactgcgcgggcggttgtttctgttcggatgcctgaggggtcaatgtacatgtaccatgcccaagataacgaaatttacgaacctctttctaccattaccggtaatcgtgggggatcacataatgcaccaacgcaaatccacgttaagccaacacacatggttggaggatacggccaattgagttacggttggaattactatggaccaactgggaaccaacgtgatctttatgcaaatgtaagaaagttgaagaaggtgaactggagtgaagattaaagcacaaatcagcatggtcttaaacctcgataagtgtattggttgtcatacctgttcagtaacttgtaagaatacatggacaaatcgtccaggcgctgaatacatgtggtttaataatgttgaaactaagccaggtgtcggttatccaaaacgctgggaagatgaagatcaataccatggaggatggacccttaattcaaaaggtaaattaaaattacgtgctggaagcaaattaaataaaatcgctcttggtaagattttttacaataatgatatgccagagttagataactactatgaaccatggacctatgattataagacgttatttggccctgaacaaaagcaccaacctgttgctcgtcctaagtcgcaaattactggcgaaggaatggaattaaccactggtcctaactgggatgatgacttagcgggatcaactgaatatgtccaacaggatcctaacatgcaaaaaattgaaggggatatcaaaaataactttgagcaggcctttatgatgtatcttcccgattatgtgagcactgtttgaatgcaccttgtgtagcctcttgtccatcaggcgcaatgtacaaacgagatgaagatgggattgttttagtagaccaagaacgctgtcggggatggcgtttttgcatgactggatgtccatataagaaggtctactttaactggaagactcataaggctgaaaaatgtactttttgttatccgcgaattgaagaaggtcaaccaacagtttgcgccgaaacctgtgtcggtcgaattcgatatattggtgctattctatacgatgctgatcgagtagaagaggcagcatcaactcctgatgagagtaagctgtatgaagcacaacttggcttattcctcgatcccaacgatcctgaagttgtcaagcaagcactcaaggatggcatttctgaagagatgattgaggctgcacaaaagtcaccgatctataaaatggcagtaaaagaaaagattgccttcccacttcacccagaataccggacaatgccaatggtttggtacattccgccgctatcaccagttatgagttactttgaaggacgggactcaataaagaatcctgaaatgatcttcccaggaattgatcaaatgcgggtgcctgttcaatacttggcaagtctattaactgctggaaacgttcctgtcatcaagaaagccttatataaacttgcaatgatgcggctatacatgcgtgctaagactagtggtcgggattttgatagcagtaaactagaacgagttgatttaacagaagaacgggcaacatcactttatcgtttactggcaattgctaaatatgaagaccgctttgttattccaagtagccaaaaggcagaaatggaagatgcacaaaccgaacaaggtagtcttggctatgatgaatgtgaaggctgtgcattagctccccaacacaagagtatgtttaagaaggcagaagctggcaaatcaactaatcagatttatgctgatagtttctatggagggatttggcgtgattgattttagacgattgacagatttaaaggatacatttgccgttctttcccgtttgattgactatcctgatacagaaacgttttcaccagagattcgtcaattattacttacagataacgcattatcaacagcaacgcggggagaattattaagcctttttgatgaattagccgcactatcttcaatcgaagtccaagagatatacgctcacctttttgaaatgaaccgacgttatactctttatatgtcatactataagatgaccgattcccgtgaacgagggaccattttagcacggttgaaaatgctatatgagatgtttggtatatcagaggcgaccagtgaactttctgattatttgcctctattgttagaatttctagcatatggcgattatactaatgatccgcgtcgtcaggatatccaattagcattaagtgtgattgaagatggaacttatacccttttaaaaaatgcagtgacagatagtgatagtccctatattcagttaatcaggcttacacgttcattaattggttcgtgtattaaaatggaggtgcaagaagatgcataatggctggtcaattttcttatgggttatttatccatatataatgttggcatcatttttcattggaacatttgctagatttaaatattttcatccctcaattactgccaaatcaagtgaactttttgaaaagaaatggctaatgatcggaagtgttactttccacattggaattattttagctttctttggtcactgcttaggaatgtttatcccagcaagttggactgcttactttggcattactgaccacatgtaccacatctttggttcattaatgatgggaattccagcagggatccttgcatttgtgggaattgcaattttgacttatcggcgaatgacttgttctcgtgtttataagacaagtgatatcaatgatattattgtcgactgggctttattggttacaattgcattaggtctagcatgtactattacgggtgcatttattgattacaattatcggacaacaattagtccatgggcaagaagtctatttgttcttaatcctcaatggcaattgatgcgttcagtgccattaatttataaaattcatgttctttgtggattagcaatttttggttacttcccatacacccggttggttcacgctttaacgctaccttggcaatatattttccgtcgttttattgtttatcgtcgacgcgcaagggtttattaatatataagaagatataataaaagcatcagatttctttacagggaaattctgatgcttttatatgtgcgcccggcatgggtattagctaggcggtgagagtccgctatgggccgtagtagtcggaaccatgagctgaggacaagggtgtccactgcgaggtggaatctgaaggaagtctaaggcaaagtactgcaccgatgaacaagaagtagctataaggctggaactaactggataagactgcatgacaagttaaagtccaacactactcgaagttactttcagtaaagctaccggtgacatggtacgaaagttaatatccttacccggggagatctggcctacacgtttccgacaagaggaataagtttaatttccacagaaacaagcggtgcagtgatgtagcgttgagtaagccagaagtcagccgaggtcatagtagtctgagtaatcagatgaaggactgaacgacaataacttgtaacttatatcggaggtgtaatcaggtgcgacaatcgcagaaaacagaacaacaagctgaccgcttgtcgaggataggtttggaaaaccgaaagtacacaagggcgcgtagtaccgattatggtgaaggtaaaggtatgagtgtcactatccaagacttagtcttggaccgcaataaccttaatcaggcttatttgcgagttaagagaaataaaggggcagcaggcattgacgatatgacagtcaatgaccttctgccatatctcagagaaaataagacggaattgatcgctagtttgcgtgagggcaagtataaaccagcaccagtcaaacgggtagaaattccgaagcctaatggtggagtaagaaaactcggaataccaacagtggtggaccgaatggttcaacaagctgtggcccaaattcttacacctatctttgagcgtgttttctctgataatagttttggcttccgccctcaccgtggggctcacgacgctattgcaaaagtagtagatctttataatcaaggttatcgaagagttgtcgacttagacctaaaagcctattttgataatgttaatcatgacttgatgattaagtatcttcaacaatatattgatgacccatggacactaaggctcattcgtaagtttctaactagcggagtcttagaccatgggcttttcgctaagagtgaaaaaggaaccccacaaggagggccattgtcaccaatactggcgaatatctatctaaatgagttggataaagagttgactagacgtggtcaccactttgtgcgctatgcggatgattgtaacatttatgttaaaagtcaacgagccggagaacgagtaatgcgaagcattacccagtttcttgaaaagcgattgaaagttaaagtgaacccagataaaaccaaagtcggtagcccgctacggttaaagtttcttggcttttcgttgggtgtagaccacaatggagcctacgcccgtccagcaaaacaatcgcaacaacgagtaaagaaagcattgaggttattaactaaacgtaatcgtggaatatccctgacaagaatgtttgaagaaattcatcgaaaaatgcgtggatggcttcagtactactcaattgggaaactaactgactttattcaacgccttgacaagtggttgagggcccgaataagacagtatatctggaagcaatggaagaagcttaaaactaaggtaactaacttacagaagctggggctgtcccagcgtgatgcatatgtcttcgctagtacccgcaagggctactggcgaactgcacacagtaagaccttgagctattctctaactaatagaaaactggaacaactcggacttatgaatatgtccaagacgctccagtcaattcaatgtgattaagttgtcgaaccgccgtatacggaaccgtacgtacggtggtgtgagaggtcgataattgaactaatcaattatctcctactcgattacgattattcgtgatttgttcttgtaaaggtaacaattgcactagctaaaattactaaaattgctcctaaaactagagaaggagttacctgaacaggaaagaaaaatgaagagtaaataataacaattactggaccaagtgcacgaacaatatttgctttaccagctgtaataaactgcaagctagtatagaaaagaagtagtgacatgaaaccattaaagaatgctccgccaaagttaaatgcgactgcttgactagaaatatggctaaatgacgttcctgttatgagagcatagcagaaaagtaaaagagccgaagtaaaatggttaaagaacaagacattatttggctcttcatcactaactagatacttagccacgatattgttggcggcatacattagtgggtagatgaatgcacaaatcaatccaagaaggttatcactaaattgaagtcggcttcctgaaataaagaaagaaccgagaatgcaaagaataattgctaagtaatcccactttgtaatcttttcctttaagaagatataagataggaagaaaacataaactaaatacatccgagcgataagggtaacagtgattggacttaaggttgaaagagcaatatattgaagaataattccgattgcatttgttccacccaaaagccataaccacaggctcttaaggttggttaaagaaacatgctgacgagtaataaggattgttgcaaaagtaaaaattgcagcaaacgcactagtgaaaattcccccaacaaccggactcaagctagtaagtgaaaatttattaagaaccggactaatactactaaataggagagaaatcagatttaattcaattccccatagttgcttctttggtacactttttatattcatttaatcacatccaatactttttattactttaattctaatgaattatattcctaagtctattaggaaaacgattaaatattttagtttacataatattcagaataataactattcaaatttgaaattttgaacaactttatcaaggtcttcttgttcaatccctagatagtggcgcgtatttcgttcagaggagtgattaaataactgcgaaatgatttcaacgttaacacctttcttatagagttgtcgaccaaaagtttttctaaaagagtgtgttccaattttagcaacgattttattattttccgtttttctagccattcgttgcaacatttcgtaaaagccatgtactgaaaaatgaccttcttgtttcccagggaaaagataatcattctcgtctttataattcaagtcattaagataatcaataatttcggcaagacaattattccaaaagagcgttttagccttacctgttttttgctcaataacacgggttttagttttatttagaacatgaccaacccttaacgttacaacgtctgatgctcgcaatccgttattaagggcaattgcaattagtaataggtttcggttaaccaattcaggacgcgaatgcagcttaattgtctcacgtaactgatcatattcttcgagagtcaagaatttaacattttctacccatattttccgtttacccttgatttgaccattagttttatttttgggaatataaactcgttttttagttgacataatatttcttcctttgttaatttgcgaggtaatcaactaaagcagggacgatttcctctccttctttccgcccagtttcataaagtgctcgaattttcttaatatttccttcaatccgcttaattttaattggtttagagggagcaatattaaagatctttccttcacaagacaaacgattaatttcagcagtctgttggttgtagagaaggggacgatcaatccccgctttagcaaattcgggataatctttatataccatgtcgtacaacttctttacagcagaactagatggcttctttcggtagttaatatccctggtccgtacaacaacaatcttgtcatagccttgtcgttgtgcaatatcaaatggaattgaatctgtgatcccaccatcaaggcaaggcccttgagaagtttcctgtggatctgaaagaaatggcattgatgaggaagctttgagggcattggttagctcctcaccaacaggatccgtaaataaaactgtttttcctgttttcacagaagtagcaactgctgtgaaatgagatgctgaccgtcgatatgcagcttcattaaaattctgccaagaatatccgtgatcttcaaaaagataatcaagattaattatttgctttttaaatacgcgagccatcgagatatattggcgatcgtgccgatgatcaatattaatattggcagcgcgtccgtattgcttagagacgaaattaactccacaaagtgaaccagcagaaacgccaattacacttcgaaattcaatatggtgagcgagaaatgtatcaacaattccggcagtatattgtccacggaatgcgccaccttctaaaactaatgctgcattatataacataaaatgaaataactcctttttgtccgccaaaaatagcaaaaatgacctaatttttagtgagacactttttcaataaaattatacaacagtctcacacgaaaatataggattttaaaagcttgttatatcaacgtttattctcggttaccgtaagactcttttatcaaaagagtcttactgattttgaaataacgcaaaagtaggggcaaaaacggattttgcctctcagacgaactgaaattcattttgatgagtagtaggtcgttacaattcgtctcagaagaaaaacgcatattgatatcaaaaaatgagtaaatagacagtaaatatttaaatatgaactttttatgaagaaactattgataatttaagataatcataataaaatagtgcacagttaattgttaaacgtttagcaaaaaaggtaaagaaacggggttatttctatgctagaacgcaaggaacataagaaaatgtataaaagtggtaaaaattgggcagttgttacactttctacggctgcactggtgtttggtgtaacaactgtaaacgcatccgcagacacgaatactgaaaacaatgattcttctactgtacaggttacaacaggggataatgatattgctgttaaaagtgtgacacttggtagtggtcaggttagtgcagctagtgatgcgactaaaaattctgctaatgcaaatagtgcttcttctgccgctaatacacaaaattctaacagtcaagtagcaagttctgctgcaacagcttcatctacaagttcagcatcttcatcaactaacacagatagtaaagcagctacagaaaatactaatgtagccaaagaggatgatacacaaaaagctgcacccgctaacgaatcctctgaagccaaaaaagaaccagctgtaaacactaatgattcttcagctgccaaaaacgatgatcaacaatccagtaaaaagaatactgccgctaagttaaacaaggatgctgaaaacgttgtaaaaaaggcgtggattgatcctaatagtttaactgatgaccagattaaagcattacattaaataagatgaacttctcgaaagctgcaaagtctggtacacaaatgacttataatgaccttaaaaagattggtgaggctttagttgatcaagatcctaaatacgctattccttattttaatgcaagtcaaataaagaatatgcccgctgcatatactagggatgctgaaacaggtgaatatgctgatttagatatttgggattcatggccagttcaagatccagtgactggttatgtttctaattggaatggctatcaacttgtgatcgctatgatgggacggcctcatcacgaagataatcatatttatttactttataataagtatggtgataatgatttttcacactggcgaaatgcaggatctatatttggatataatgaatctccactaacacaagaatggtccgggtctgctattgttaattctgacaactctattcaactcttttatactatcaatgatacaaataatgctattaaccatcaaaaattagcaagtgctactatgtacttaacagccgacaatgatggtgtccatattaataatgtagagaataatcatgtggtatttgcaggtgatggttatcattaccaaacttatgatcaatggaaagctgcaaatagttttgctgacaactacactttgcgggatggacatgttgtacaaatgccaaatggtgatcggtatttagtatttgaaggaaatactggaactgaaaattatcaaggtgaagatcaattatataattggtcaaattatggtggtaacgatcgctttaatattgaaagcttgtttcatcttttaagtagtgatgttgattataaaaaagctatctttgctaacggggcacttggaattattaaactaacgaatgatgaaaagaacccgcaagtagaagaagtatatactccattagttacatcaaatatggttagtgatgaacttgaacgtcctaatgttgttaaacttggagataagtattatctattctcggctacacgtttaagcagaggaactaatatcgatactcttaataaagctaataaagttgtcggagataatgttgcaatgattggttacgtagccgatagtcttacaggtccatataaaccattaaatggttcaggggttgtagtgacagcttctgttcctgccaattggcgtaccgctacttattcttactatgctgttccagtagaaggaaaagaaaatcaattactcattacttcgtatatgacaaatagaggcgaagttgctggaaaaggtatgaattcaacatgggcaccaagttttattgtgcaaattaatcctgatgatacaactatggtattagctaaagtaactaaccaaggggattggatttgggacgaatcaagtaacaataataatatgttaggaaacattcaaacagctgctttacctggggaatttggtaaaccaattgattgggatttaattggtggttatggattaaaaccgcatgatcctgctacaccaaatgatcctgaaacgccaactacaccagaaacccctgagacacctaatactcccgaaacaccaaagactcctgaaaatcctgggacacctcaaactcccgatacacctaatactccggaagttcctttaactccagaaacgcctaagcaacctgaaacccaaactaataatcgtttaccacaaactggaaataacgccaataaagccatgattggcctaggtatgggaacattgcttagtatgtttggtcttgcaggaattaacaaacgtcgagttaactaaatactttaaaataaaaccgctaagccttaaattcagcttaacggttttttattttgaaagtttttattatcgaaaaaaacaaatcctcgttaatcctttaatgcaattgttgtaaaaccttgcgacagtaataacagtggatttgcccatctttgtcagctaacttccgtgcatgcattgcagaaaaagtatagtgctcatgacaaaatggacaaacatattgctttttcccaaatagtgaggtaataaagcccaaaattttctcctccataaaaaaattatacaccccttaacattatagcgaagattatctttatagaaaaggcttttattcatttgtttttttatatgaagtttcactaatttctttaagagcatcacgctgctgtttctggtcaacgtgagtatataaatcggtagcagatgttcctttttgtcccaactgttgggccactaatacttgatctttcgttacctcatacatttcagaagcaagggtgtgccgtaatttatggggagtaagaggatggccaaatgcggttgaatactttttgaccattttttcaattgcattagctgtcatccgtcgagtttgcttgtgataaacggttaggaagaaagcagtatccttttttaaagcgtggtatcgttgtgcacgaatcgcttggtaagtttggatataagtaatagcccaaggagcaattggtaccgaatccctctggccaccttttcttgttacatctagcagcgattgttttaagtttaaatcaccaaggtttacatttgccgcctcggatacccggacgcctgttcctaaaataagagcaataattgcaatatctcgttccttattgaccttataagaggggagagctcttttatcacatttattagggtattctttttcaatgaaagtaataaaatcaaacttcatttgtccccggtacatgtgtgaagccagcgtatgagcccgataatttaatgtttttgtatcattaagggagtcaattttcagcattacattacggtcaaaataagattcaccattattgttatctgcggtaactgttaaaaatttatacaatgaccttaatgcattaatagatcgattgattgaagtaggagaatttaaccgtccttgtgcattggtagtatgctgcaaataatcgatatacaacattacatcgctacgccgtagattcgccagtgtatcaattggtaagtccttattagaattaacagagacgagtccacttgaccgtaaccaatcaaagaatcgacggatttcagttaagtactgataggttgttgtgactgcatggttggtccctaaataatactcgttaacataatcaggaaggttctgaagctcctcttgaattagctttaaatatttatctgcttccatttttatatcctccttgatactaaaaagagtcgcttgaaagaaaactttcaacgactctctaaacctatcgggaaaacaggattcgaacctgcgaccccctggtcccaaaccaggtgctctaccaagctgagctatttcccgttaataacgaacaaatattattctaccaattctcaattaattagtaaaggaatattttaatttaaagtgattaatagttaatgattaaatgacataatagtaaaattcctattaattgcaaaaaaatcatgattaaccgaaatccttttctagcatctaatgaagatgataaataattttattttcgactagttataaaagatacctttccgaaaataatttgacattcaaaatacttttgaatataatttgattatcgaatattttgatactcgaaatattttccgaaggcaggtgaatctttttggcaataatgaatgcgcaggagattatggaattaattcctaatcgatatccgatttgctatatcgattatgtagataaattagttcctgaagaaaagattaccgcaacaaaaaatgtcacaattaatgaatcattttttcgcggtcattttcctaataatcctgttatgcctggagttttaattatcgaaacattggcccaagctgcttcaattttgatattaaaatcaccgcatttttataagaaaacagcttatcttggcgcaattcataaagcaaggtttcgacaaatggtccgtcctggtgatgtattaaaactaaacgttgttatgaaaaaagttcgatcatcaatggggattgtagaaacacaagcgcttgtgaacggcaaattagcttgtagtgcggagcttgtctttatcgttgctgaacgagaagaaaagatttagcacggtgaatcattatcatttataatatattttgataatcaaattattcgggctatagaataaaattgaagggaagaaatatattatgagtaaagataatgattacgaaaaaattaataaaggattaatcaaagtttattccggaattctatggattgaagaaaatgaattgcggaaaagtacattcaatgatttaacaattaaagagatgcatgcaattgatgcaattacgatgtataaccatcaaacaatttctcaagtagcagaaaagcttcatctaactccaggaacaatgacttcaatggctgatcgtttaattcgaaaaggatatgtggaaagaattcgtgataaagatgatcgccgcattgttcggttatgtttaaccaaaagaggccgggtactatatcgtgcgcaccgggcctttcataacatgatggttgaacgttttcttaaaggaatggatgatgaagaaatgaaggttgttaaaaaagccttgcaaaacttagaagattttgtggatgagcatgcttagagataaggattgacaaacattgcaaaatttaagaattactagtactgcgagttatcatccaccccttaaaattactaaccagcaattatcaactattatgaatacttcagatgagtggattaagacgcggactggaattcatcaacgttatatcagcaacactgaaaatacttcagacttagctgtcaatgttggtacccagttattgactaatgccaatttaaaggcaactgaacttgatttaatcattattgcaacgatgtctcctgatgcctatactccttcaactgctgctattgttcaaggaagattaggtgcgaaaaatgcaattgcgtttgatatctcagcagcttgtactggttttatctatgccattaatacagctgaattaatgttgaaaagctctcattggaaaaatgcaatggtaattggtgcagaagtattatcaaaactgattgattggcaagatcgaagtactgccgtattgttcggcgatgggctggcggagtgttacttcaaaagacaactacaacaacccctttaattctcggccgtgatctccatacatttggtgacttaggagataaaattattgccggaaaaacaacgcctaaaactggcttccctaaacaactaacatccctttcaccatttacgatggccggccgtgacgtataccgctttgccactcatgaagtaccacgatcaatcacttctgccgttcaacaagctaatttgaaattagacgatatcgattattttttattacatcaagcaaatgaacggataattacccaaattgcaaagagactggcgcaaccaattacaaagtttccaatgaatattagtgaatatgggaatacagctgccgctagtgaaccaattttattgactcaagctattgctcatgaattgattaaaccaggtaacattattgcaatgagtggctttggtggcgggttaagtacaggaacaataattttaaactattaatagagaaagaagaatggatatgactaaagaggaaatttttaatactgtaaaaactattactgttgatgaattagatgttgacgaaaatcgtgtaacaatggatgcacgaatcaaagatgatcttgatgctgatagtcttgatgtttttgaaattatgaatgagcttgaagataagtttgagattgaattagatgccgatgaaggaatcgagactattagtgacgttgttgatttcgtaaagaaacagttggatgaaaaataatgtactacggaatattatttagcggtcaaggtgcacagcgatcgggaatgggagtcgagcttatggccgactcccttttttcaaggattgttagtcaggcaagcgctgtttgtgaacttgatttgctcaaaattatgaaaaacgagcataaggagttgaataaaacagcatatgttcaaccagcaattgtaacagttagttatggaatctaccgaatgttaaaacgggatttacctcaactaccaattaaagggatgattggcctatctttaggcgagtacgctgctttaattgctagtaatgcactttcatttgaagaaggaattaaattagttgcggaccgtgctcactttatgcaacaagacgcggatagagaaataagtacattagcagctgtccttgatcctcaacttcaagagataaaagaactaatcaccgctcaacaagaaaatggtcagcgagtttatattgctaactataattcaccacgacaaatcgtagtgggcggggcattaaacgctttaaaggctacccttaaaaagattgaagaggacaagcttgctaaaagaacgatcctgctcaaagttaatggtgcatttcatactcccttctttaacggtgcacgtcaacagatgcataaccggttacaagcagtcgacttccatgagccacagattgaagttattagcaatactactaacagcttgtttcattgtgaggatcttccaggaattcttgaaaaacaattagctgttccaacacactttggagctaatgttaaggaattagtcaagcacgcgaaaattgacacaatattggaaattggtcctggaaagacgttatctcgcttcgctcaccaagttgaccagcacttaaatacccaacacattgaaaatcttgctgattatgaaaaatttataaaggagcaaaaagatggaactgacagataaagtcgtttttataagcggaagcacacgcgggattggggcggctactgcattagagtttgctaaggctggtagtcggctaatcctcaatgggcggcaggataacttaccaaaaacgtttaaagaaaagctagatctactaggggcggattatcactatcttaagggcgatattgcaaatgaagaatcagttagtgaattagcagcagcggcttggcaaatatacgagaagatcgacattcttatcaataacgcgggaatcacgaatgataagttaatgatgggaatgaaagcgagcgattttgaccaggtcatcaatgttaatttacgcggaacatttatgttaacgcaacctatttttaagaagatgctcaaaaaaagagtcggttgcattatcaaccttgctagtattgtgggtctccatggtaatacgggacaagctaattatgcggcaagcaaggcaggtatcatcggccttactaaatctattgcccaagaaggagcacgccgtggaattcgttgcaatgcgattgctcccggaatgattactagtgatatgactgaaaaattatctgagcgagtaaaagaacaaattctcagtcgcatccccctcaaccgcttaggacagtcagaagaagttgctaagaccgcaaaatttttagcagaaaacgattatttgactggtcaaaccattgtagttgacggtggcatgacaatttaggaggaactaaatgacaagagttgtaataacaggaatgggtgctgttgctcctaatggtaacggtattcaagaatttataagtaatagttttgcaggcaaagttggaattaaagcgatcaagaaatttgatgccaagtcgacaggaattaccgtggcaggtgaaattgacgattttgaccctaatgatgtcattggaaggaaagccgcgcgccgaatggatctttattctcaatacgccttacaaagtgcgattgaagcaatggaaatggcggagattaacgaaacaaataccaagccagtcgacatgggtgttatctatggatctggaattggcggtttgacaactattcaagagcaaattatcaaaatgcatgataagggtcctagacgggtatcaccaatgtttgttccaatgtcaattgctaacatggcagccggtaatatttccattcactttaatgcgcaaaatatttgtacatcgattgtgactgcttgtgccactggaactaatgcaattggtgaagcctttcgtcaagttaaagcaggtcgcgctaaagtaatgatcgctggtggatcagaggcttcggtgaatgagatcgggattgctggttttgcggcattaacagcattatcacaagcaactgatccgcttaaagcttctttgccatttgataaggcacgtcaaggatttgttttgggtgaaggcggtgcaacacttgttttagaggatcttgagcatgcgcaaaaacgcagtgctaacattcttggtgagattgtcggttatggtgctacctcggacgcttaccatattacatcccctgatccaactggtgcaggggcggcaagagcaatggaactggcaattaaagaagctggaattagtcctagcgaaatttcctatattaatgcccacggaaccgctactcatgctaatgatgaaggcgaatccaaagcaatcaatcaggtatttggttccgatagtaatgttcgcgttagttcaacgaagggaatgaccggccatttgcttggggctgcgggcgcaattgaggcagtcttaacagtagccgctttacaaaagggacaattaccgttgaatataggttgctttaatcaagatccaaaatgctcggttaaccttgtgacggcagaaaataggaacgcctcaaccgcccgttacgcaataagcaattcttttggtttcggtggtcataatgctgttttagcctttaagaaatgggagtgatctatcttggaatttaaagaaattcaaacattaatgcaaaattttgaagattctgatattcgtgaattagaaataaatcaagattcctttcagctctatttaagcaaaaataagcaaacccacaagcatgaaaatcttataacaaccgaaaaaacagagcaaacgacttcagctaagaaaaaagcaaacgaacaactaactttaccttcgcaaaatataactgcgcccctagtcggaacagtctatctccaaccaacccccgatgcagatccctatgttaaaagtggcgaccacgtaaaaaagggggatgttgtttgtgtgattgaagcaatgaaaatgatgacagagataaaaagcccttttaacggaaccattacttcaatttgtgtaagcaatgaagaattagttgaagtagaacaaccgcttttctcagttcaggaggataaagacaatgcctaataaaactttagatataactgaaattcaaaaaatccttccgcatcgttacccgatgttgctaattgaccaagttgatgaattaatccctggtaagaaggccattacacaccgtaatgtcacgattaatgaagaggtttttaatggtcatttccccgaaaatccagttttaccaggagcattgattgttgaatcattggcgcaaacaggtgccgtcgctctcttatctcaagaagagttccaagggaaaacagcctattttggtggaattcggtcagcagaatttcgtaaggtagtccgtccgggcgatacgttaaggttagaagtcagactagaaaaagttcacaaaaatattggaattggtaaaggcattgcaacggtcgatggcaaaaaagcctgtacagccgaattaacttttatgattgggtaggtggtttaatgttttccaaagtactagtggctaatcgtggtgaaattgctgtcaggataatacggtcattacgggagctaggaattaagacagtagctatctattcaactgcagaccgcgaaagtcttcatgttcaactagcggatgaagctgtatgcgttggaactgcccgggcccaagattcatatttgaatgcgaaaaacattttagaagctgctcttggtacaggtgcccaggcaatccatcctggctttggctttctatcagaaaatgcggaatttgcgacaatgtgtgaagaatgcggaattacgttcatcggtccccaagcctcagtgattgacttaatgggaaataaggagcatgcacgggagcaaatgaaaaaatcaggggtgcctgtgattcctggaagcgatgactatattaccaatgttaatgacgctgttgaggtcgcaaacaagattgggtatccaattttgttaaaagcagctgctggtggtggcggtaaagggatccgacgaattaacgatcataaccagatgcggcaaatatttagcgaggcccaaaacgaagcccgactttcgtttaatgatgaccgaatgtaccttgaaaagattatggagaatgttaaacacattgaggtccaagtatttcgtgataattttggcaatgccgttttctttcctgaacgtgactgctcgattcaacggaataaacaaaaattgattgaagaaagtccttgtgtcctagtaaatgaacaagagcgaaaaacgctaggacaaattgcaatgcgagccattaatgcgattaactaccataatacggggacaatagaatttctaatggacaaggaccatcacttttactttatggaaatgaacactcgtatccaggttgaacatacagtgacggagatggtaactgggatcgacttagtgaaggcacaggttattgtcgctgcgaatgaaccacttccctttacccaacaggatattcaggttcatggacatgcaattgagtgtcggataaatgctgaaaatcctaaacaaaactttatgccagtgactgggacgattaattacttatatcttccagtcggtaatttggggatgcgcattgacactgctatttatcctggcagtaagatcactccttattatgattcaatgatcgctaaggtaattgcccttggtcaagatcgccaagaagctattgaaaaaatcaaacgacttttaaatgaaatggtaattacgggcgtaacgaccaatcaaaatttccatttagcaatcctaaacaatcctaaatttttggcaggaacagcttcaacaacgtttcttgaagacttcttcttgccacaatggaaaaaggagctgacagcgtgaaattatatgatcaaaataatactttaagtgaacggcacatcaaagcagataaaaatgctgatgaaagggtcccagatcaaatgtggttaaggtgtccacattgtcatcaattactattcgccaagcagttaacacaatatgctgtttgtcccaattgtgactatggattacgaatacctgcccgccatcgactctcgtggttagtagattcatttaaagaattcgataaggatctccagacaaagaatccgttacattttcctggataccaagaaaaaatcagcaaacttcaaagacaaactaagctgaatgattcagtcctaactggtgaagcttcaattaatgatcagctattttcactaggtattatggatccaacatttattatgggatccctcggaactgttaccggtgaaaagataacgcgcttatttgaatatgcaactatccatcgtcaagcagtagtactattcactgcttcaggcggggcacggatgcaagaaggaattatgtcgctaatgcagatggcgaagatttcacaagcaataaatgagcatgctgctgccggccttttatacattgtgatcttaaccgatccaacaactggtggagtaacagctagtttcgcaatggacggagatattattctcgctgagccccatgcacttgttggctttgcaggccgtcgagttattgaacagacgattcatcagcaaattcctgttgatctccaatcagctgaaaacatcctgcatcatggatttattgatcgaattgtaaaacgtcaagatgaaaaaaagctgcttgaatggctattaaaaacagggagcgttgctaatgaatgaacaattatcagcaagcgagattgttaaacgtgctcgcaatgacaataaaattacggggatggagattattcaaaatgttttcccagattttgttgagttgcacggcgaccgggcaggcggggatgatcctgcaatcgttggtggaatcgctactttccatcagcaagcagttaccgtcattaccactgatcgaggaaaaacaacagaagaaaaaatcataaagcattttggctcaccaatgcctagtggttatcgcaaggcactccgcttaattaagcaagcagttaaatttaagcgacctgtattctgttttgttaataccgcaggagcatttcctagcaaggaagccgaagaaaatgggcaaggaagtgcgattgcccaaaacattttacaaataagtcagcttgccattccaattatcacgattatttatggtgaaggaggtagtgggggagccttagcattggcatgtggagatgaagtatggatgttagaaaacagtacttattctattttatctcctgaagggtttgcctccatcatgtggaaagatagtacgaaagcagataaagcggcagaattaatgcaaatggtgccgcaagctttattaaaacaagggattatcgaaggaattattccagaaagcgaagagcatcgtaaaacttgcaaaaatatcgagcaggttttactaaagcgattaaacaagctgcaagaattaccgccaaaccaacttctagcaaacagaaaaaaacgttatcgaaagttttaaggaggataatatgggaaatatattaacaggaaaaaagatcgttgttatgggagtagctaataagcgttctattgcatggggatgtgcacaaatgatggctgaacaaggtgcccaagttatctatacttatcagaattccagaatgaaaaaaagcttacaacggttagtagatgatgaagatcaattaattgaatgtgatgtagcagatgatgaaagtattgaccaagcctttacgattatcaaggaacgttttacaaaagtagatggaattgtacacgcaattgcttttgcaaaaagagaagaattagctggttcaatccttggtgctagtcgcaaaggttatgcaattgcgcaagatatttcgtcttactcccttattgctgtcgctaaggttgctaatgagttaaatctattaaataatcctgcaagtattgttaccttaacttattttggctcagaacgtgctatccctaactataatgtaatgggaattgctaaagctgcccttgaagctagtgttcgctatttagcacgggatttaggacaaaaacgaatccgtgttaacgcaatctctgctggcgcggttaagacattagcagttacaggtattaaaggtcatgatgaacttttaaagatgtcccaagcaagaactgttgacggagaagatgtgactattagcgaaattgggaatgtgtgtgcattcttaatgagcgatttatcaactggagttactggcgacaccatttatgttgataagggggtacatttgatttaaaaatataaattttaaagactgagaaatgagtttttttcagtctttttgctgtcttttagaaggaaaacataacaatagcaagaactttttttaattttttctaaaaagttcttgctattttatagctcagttggtattattaataacgttgtgaaagacgagttaataattttgagaaaaattgtttaatatatttaaaaatggcccgttagtcaagtggttaagacaccagcctttcacgctggtatcgtgggttcaaatcccgcacgggtcacttttgcggaagtagttcagtggtagaacatcaccttgccatggtgggggtcgcgggttcgaatcccgtcttccgcttagccagttctattatgccggggtggcggaattggcagacgcacaggacttaaaatcctgcggttagtgataaccgtaccggttcgatcccggtcctcggcactatttcgggaaatagctcagcttggtagagcacctggtttgggaccagggggtcgcaggttcgaatcctgttttcccgatctggctaaacagctaagaggtaatcttcttagctgtttttttggatatctgtcaactggtatggttgactaaaaatttttttagtgcgcccggcatgggtattagctaggtggtgaaagtccgctatgggccgtagtagtcggaaccatgagctgaggacaagggtgtccaccgtgaggtggaatctgaaggaagtctaaggcaaagtactgcatcgatgaacaagaagtagctataaggctgaaattaactggataaggctgctagacaagttgaagtccaatactactcgaagttggtctcagtaaagctaacgatgacatggtacgaaagctaatattcttacccggggagatctggcctacacgtttccgacaagcagtactaacgcagccattaattagttttttgaaataaaataaacttttttgaaaaaagtattgctttttataggataacttgataatataatattcgtcgctgatatgcgggtatagttcagtggtaaaaccacagccttccaagctgttgtcgcgagttcgattctcgttacccgcttttaattaatttaatatggcccgttagtcaagtggttaagacaccagcctttcacgctggtatcgtgggttcaaatcccgcacgggtcatttttggaggattagctcagttgggagagcatctgccttacaagcagggggtcacaggttcgagccctgtatcctccattgaacaattttaatagttgttcaacattttaatataattgggctatagccaagcggtaaggcaacggtttttggtaccgtcatgcgctggttcgaatccagctagcccaattagtctaaaacagtgagtaaaaattactcgctgttttttattagaaaaaataggcaatctaataacgtaggctaaaagcgaacatcattggattgcccaataattagcataatttattcacgtcgtaacataatatgccagacaaagaagccgactccaataattaacgccaaccatgcccatagttgcaatggaagatagatagtacacgttaacaagcctaaaacccaactgattagcatcatcgataatccagcaatatcgccacctaaaccatcaataccacaagtagcgatatagacgattcctgatgccagatataatagcgaaacaattaattcggctgttccggcataaataggaattgcaggattaggattcccaaaacctcctcaagtcttattctacccggatgattagaatttataaagaattacagtttttctatttacaaatagagcagggggaacaaaaaatcaaaccagaaattatcttctgatttgattggatcttatttagttgtatcttttacttttttcaaggcttctaaaaatacttcataaggttgtgcaccagtgattgaatacttattattaatcacaaatagcggtgcacttggcattccaatcataaatgcgcgccgttcattttttcgaacttcatcttcatactgattagattcaagaacttttttaacatcagcaacaggtagtccgatttcattcattgcaacagttagagcttcatagtccgcgattgattcattatcattaaaataaagttgataaagacgtttaacagccttattaagtaatgcttggtcatttaaactctcaatgtattttattaagcgatgagcagctaatgtattaacaggaatcgcattttccatcttaattggtaaatcaatatcggcagcaagttgatcaattttatgtatttgtgtaacagcttcttgcttagttagttgatgagtttttgcataatattctgtcattgataaatcagttgttgttggcaacgttggatctagttgaaatgacataaattttaatggtgtctgatcggcaatctttaattctttaagcgcccgttgtaattgtgtaattcccatatagcaatatgggcacgcaatatcagcccagtattgaatttccatagatgatcgctccttataaatatatattaatttaatctaatcataaaataagcgaagttgctagtaaatacgtaaagagggaacgatttattttaaaattaacatgtcattaaaattatagttttaatgcgactgaatttaaaattccccccagaatatcaatttttagctttctcaaaagaatttatttaatgcttatttttaactttaataaaactttttctaaacaaaactaatacttttgatttatgttttaaaagatttatgtaatactattgatgaagtctatgtcaaaagtattttaaaaggagtttttatcatgaaacatacgcttaaagttgatcaagtacgtgacggtttatggctagattcagatattacgtatacgcaagttcctggatggcttggtaatacaacgcgagatttgaagctttcagtcattcggcattttcaaactaatgatgatacacgttacccagtaattttttggtttgctggtggcggctggatggatactgatcacaatgttcatctgccaaatttggttgattttgctcggcatggttatattgttgttggtgtcgaatatcgtgatagcaataaagttcagtttcctgggcaattggaagatgctaaggctgctattcgttatataagagctaatgccaagcgctttcaagctgatcctaatcggtttattgcgatgggagaatcagctggtggtcatatggcaagtatgttaggtgttactaatggtcttaaccaattcgacaaaggtgctaatttagattactccagtgatgttcaagtagcggttcctttttatggtgtagttgatcccttaaccgctaaaacaggaagtgcatcaaacgattttgattttgtttaccgtaacttgcttggcgctgaacctgaagctgcaaatcccctcacgtatgtaaattctacttctacgccctttcttatctttcatggtacggaggatgtcgttgttccaatcaaagatagtgaaaagctttatgatgtattagttgaaaacaacgttcctactgaattatacgaaattgaaggtgcaagtcacatggatgtaaaattccttcaaccacaggtatttaaaattgtgatggactttttagataagtatttaacccggccatagatcatttcttgcctttactactaaaaagcaaactaataacaatccaactttcacattattgacaaaatcaaaaagcaccatgaaattactttttcacggtgcaactattgttaatatttatctacttggcttccatcaatggagaaatagacaacttgatttgcaaacctaatccagcagcatatttatttaatgtaggcagcgtagggattgaatctaaattctcgattttagccaattgaggttgtgtcataccgattttttttgcaaattctgtttgcgaaatgccctgtttaattctttgtacttctaaaaaagacaaggtatcaacaatcgataattcttcttttgttgcagccgtctgatgcttatctatatcttcccattttctcattatttacccttcctttcgtaccaatcgtcaagtagcgacaaggctctttctatctgacgaggatctgtttcatcctttttcttagcataatgatttaataatacaaaattatttttcttccatactccataaaatactctttctggcataggtcgtaactcccatagttgatgcctataaccctttaatttttttgcttgtggtgtatgcaacacaggaccaagagcttgtaacatcttaatttgatggcgcatttttaaataaattgctttatcttgcttttgtttactttgcgaaattttctcgaaataatcaccaatttcactatttccatttttatcttcgtaaaaaactacttcatacatgcactatttcctttattatagcttatttattactaattatagcaagattgctatagctttactactattaaaatatattccataatcaaaaatttttctattgaaagcacccgcacactcaattaaatcaaataagtttacggcaatgattatttttggtgcacaaaaattgccgatgttccccagctttacaaactttcaccatttcataccattttaactaaacaaaagctccggtaaaatgccgttatatcagcattttatcggagcttcttttttatacaatcttaaaaaaatgcgtcccccgagcatagaagattgttgatatatcaacgttttgaaggagttagtgtgccaaacgtgtgcgaacttaactaaaataaaaaagagcgcctatcagggcgccccacgttataccggtacggatcaagtaacgaactgaatccaatttgcgtgccgatacttctcatctgatatttaaattataacataattattttatgatacaataattaatgcgtgtcgggagtaacgacccaaactatcacgcaaaaggggtgaattccccgtgacatttatacttctcattctgatcgtgccgaacgggctcgtcaagcaactgatgcattatgcaaaggttgtaatcaaaaaggctctcaaacatctaattgatgaattacttggttaattctgataggaaatgtgcgagatgctatttcagcggtagtgtttgctatcgctgttttttattatactttaagaatatagtcatggtatttttttaccttagtaactattcagtttaatgttactctattaaattttgaattcctttacatccttaacctctatcatattacaatctttatcttcaacgtagacgaattctgacatatcatcaatatcattgaaatctttattagctgcgagttctgcagcatccttaaaaaaattaggccttttttcttctattttgtccatcggtactaaacattttaatatgtaagttttgaaatgctcttgttcccatcttgtttgaagaggcccttttaatggcctacttctaatattatctaattcatatatggcactatcaaggtaccttaaaatttcaggacacttataaatgcaagaataatcaaaatgatatggtataaaaaagccactaattccgttatcattttccaaacgtgctgcaatatcattccaacttccaccagattcaatcaggtatgagtgcccattatatgaaataaaaggattattatttttacagtagaaacgaatattatttttttctaaaaatgatcctaacaaggtactagaatctgttataactttgctaagtggttttaatccatcatataaatagttcctttgctgtgaagaacaagttgtaaagtggtaaaaatatgcattttcaatttcatcttttttatatagttctaatgatctttcagccatttcatgagtcgataaatcaaatatcttgtattttttcttttcagacaccatggttttctcctttttatgatatatctaatttagattactatatgacaaaacaccctagcaaccattaatcggctactagggtgtttattactataatttttcacttaaatctgaattgtttgaccaatgaaaatcatattaggatttgcgatgccattcttttgagctaatgcttgccaggtcttgccaaacttagccgcaattccgcttagtgtgtcccctgcttggacagtataagcattggattgtccgttgccggctaagtagagtttttgcccaacgtagatcacattcgggttagtaatgtgattacggcttacgaggtctgagacagtggtgccgaatttggtggcaattccggataacgtatcgcctgattgaacaaagtaagtattttcgtttgatacttttccggtgactttgaggacttggccgacattgatctggtttggattaccaataccattgattgctgctaggttctgataagtagtcccgtatttttctgcaattccactcaatgtatcgcccggctgaacaatgtaggttccagtagctgggtgaccaatatgttgaaccggctgtggtgctggaataacagcttgcggaacattgcctgatactaaaccagtcgtaaaggcaccgtcaaagtcataactagtatcaattcccatgatgctatgatcagaatattgccaagcacttgcattatcaatccccagttcagtcacaccatagccagcaatccaaatcttccgggaatcaaagccatgtgaattaagaataccgccagtgaagaaggacttcatggagtaaatcccagtattcttgtaaccaagagcttctacttcttgaagaaaggctaaggatactgattgataatctgcagttgaatgaacttccgcatcatcaatcatcaaagtatcgtcatacataccaaattgcttagcgattttaacgaagaatcgagcttcattttgtgcatcagtcactgatgtataacgagcaaagtggtaacaggaaacgcgcaagccaaccgctaaggcattacgaatttgagcggccgcacgtggattaacataagccgaaccatcttcggacccttccgttaacttaacaacgacccctaatgcaccctgagctttagcagcttggaaaaaggcaacagtatctggttgataacttgaaacatcgatgaattgattacgcatattattcttcccctttcattggatcgattgctggtgcttggccggctggaatagtagcgggtttagttggttgtgatgtcggatcaacggttggtgtcaatgcagacttttcataagctgattgcacaagcgtttcaatagcgttaaggtcaatattcttaataccctgcttttgaagtgcttgttgaacaatacctgttgcttgatgaaatttctcatgaccagccatgtctttgccaactaaggaagcaacggcattatctgcaagtcgttcagcacaagaccaagcagcacgagaagtttctgttttggcatgagtgactttagcgtgaataaatgtctggctttgctttaaggcaaaataaaagaccgttgagataacggccgtcatgatataggttggaattgcattaatgattgtgctcatgttgtttctcttctttctctacataatctttgctgagcttgtaaatatgattctttacccaagatggtaatggtagtcccatttggccccagttttcgataatcgaaactaggtaaaataggaaaaagaaaaagacaagcgagtcgcctgcctgtcctaatccgcataattctaacattggataaacggttaaagtcaaaataataactgcagcatgtttcaaaagtccacccgttcctttactagaagttgttcggtgcgtaatgatacttttgaaaaaacctgtcacaatatcaatcacaatcgcccaaactaaccattcaatgagcacgttgtcaatcatgctggcaaaatattgaatgtatagaacgtgttgtggcggttgtgtcagtagtaagtgcatttatagtggtcacctccttataagggtaaaataaaaacgccctgtagaggacgtttaaaattatttaatttttattaaaagattcccaatttccatcttcattattattgattttaattattaagtcgttaagtttattatcaatatcattagctagcttatacgcacttgaatcacctcgtactctagtaatttcatatatttttccttgacgaagttcttcagtcaaagatttaatattatctatttcgttagaatatttctgtttgagattcactttatccccatctccttaccgctaaaataaaagtgttatattacgctgttactaaatatggaatattattatcagataaccattgaactgcattattattaatttttacaacatcatctaaaattttatctaaattaaatgaataaccaaatataaaaaattcatgcttatgaggatcgtatactcttaaagtttcatcttttgtaggagtgaacactttgtctccaacttttatagtttgatacaaattaccaattacttgtttttcaaccattatgtgctgacgtcggttaaatttaataagtccttcatcaatatgttctaaactattcctgaggcctcttaaattttcattttcgaccctattaatatagaaatcatcagttacattcaaaatttcccttaccttttttcgatcattactatttttagagttagaaccccatagaagcttagctatatctgacgtatacaatgcaatattttgtaaattataccaaatcatattatctttataatatttttcatgtttggtattatatatatttttaatagcaataatagtaaaattacataacagataagtttcactaattgcatactcctcgtctttactattcatagtataatgttgcataatatttaccattccccttattaattgtttagtaatattatcgtatcagtaattgaaataattatgatattattatgaaaaattgaagaaaaaccaaaggctaataattaatttacaaaagtatggaatcaaaattttaataaaatgccgcccataataaaagccccgctcgtttgagtgaggcttatttatgtattgtgtatttctaaggcgactataagtaattaccgttaagctaagaattcatttaattattagccattttctttagcttttctttatcttcaatctgatacaagcgaatcttagtaattaatccctgatacgcttttacttcattgggaaaattattagcaggagtaaatttatcatcttcttgggacaattcagaaacatagaatacatttcgataataacctatataaagtttatggttcagtttcctatataatttatttttttcaataatttttgcttctttaggagtataaccatcttgttttcggtcaaaataggcttcccatttaatgcactgttcctgtgaattaatccgatttgtttttaaaccaaatgctgctaatggatacccacctaatttgggattgttacacaattcattatcatattcgtaagcagtattaacaatatcttctaatgattttgaaatattcaagataaccacctctattttatagagtatcactaatttagactactaaacaataacttaaataattttattgtcatgatttatgctccttgaatttcgtaattctgaccggttaccgtcttatattcatctttagtgatcgctccgcatcgtacataaactttgtagaattctaaatcatggttaccccagtcattccaaaacatttgaagcatttgtaattgtgtcatcattatgccgttacctccttagatttttcgactgcctgttgctgattaacagtcataaacatttgttgtaattgcttgatttgagttgcttgttgagcattagtagcctgcaattttgcatttgattggttctgttgcataatcattgcttgcaaaatagtgatttgttgattggtattcccgtttgaatgcgaaataatcgtcacaggaatttgactatcattcataataaagctctccttagtatatttttgtttgataaaacactgttacagttacccctgtattttgtatagctgagttatcaatgtttctaacgattaatccatcgccgtttccagcttctgaaacactcaattgccagcggtcgccttctgcaacatagttaagtattttcccagtaactccaagttctttattgatagcatccattggaagtgtcttgacctcttgcgaattaagttgatcaatagctataaatttagtaatcgtctttaaattagaattgtaatctgtttgatgatcttgcaaactcattcctagcgatgtattgcctaaactaatgagcgaagttggcgttttatcagcataaattctcccagcttgaaaatgggctgagttttgatcgtaaaatttaactccagtattaaaagcctttccacctaacttaaagtgatccacatctagatatgttccagtcgtactaggcccaatatatagcccattcatgctttctctttcagctcctagcataatctcgtttgctgtaaactcagcgttagtttgcagagtgagcaactgatcgcattttcccccaagtgcaaggtaatcaatgtggccctttgatagcataatttttagattagcttgtccacttttatttgtaacaaaatggctttcccaatgtttgatagttagatcgtaagttgaatcaatcactgatccaatagcattgtctgctatatcaaacgtttcctcccacacaaaagaatattcaccgaaaccggattgttgcgataccgaatgctgatacaatgtttgatagcaattatagttccaaagtttgattttgatcccaatattatgtgtgttatctgcatctgtaccagttacgtttaatatacatcctctgaaataataccctttaatcgaaatattactatgaaacatggtatcaaaagaaaccccatacttagctgcacctcgctctagcataatttgaatatcattttgatttccatttctaaatttgaatgcaatttgatccacgtttagtgctggtgttaactttaacctcaacgaaatatgagactgcttcaagtcaatagctaatggactttcaattagataacatccattcccatgaacacttttattattatcaactgcataggttagaatgctttgaaggatttggtaatcatcatttttaccatctccatgtgctccccatgtttcaggtataatttcattttcaataagttccgctaatagtcctgatgctaattgttctgcatgtttagttgttgtatctgtgacataaaaaagccctcctcctccatcatttggttcataatagccaagagttcttgcgcacatatctttgcttaaagcactatcagctttcatggcagctacatttggatacacatgtgcatagttaatcgcaattgccttcatcatttcctgcttaaacgcctctgcttccgcctgggtaaacaaattgtcttgcttaatcttagcgtctagtgcatctaaaccattttgaacagtaacgccaagagctttgagcgtgttcattgattgggtaaacttatcaataaagtcactggtcatcttggtgagcttgtcggtactgtcttggtacttggcttcgatttcgttaattaactcttcgacgggtgaaatatatgttcgtggtaccaagccatcaatgaccttatcagcaaggacatcgaggtcgaattccaaggtagtgatagagttaccgtctttgaggatgcgaaaaaaggcttggcgataggaaccagcgactgtaaaggcatggccgggcatgtcgaaacggaaacgtccggcggttgggtcaagggcaacgtagcctttatcatcaattactcggaagtcgccggcggaattcttaggaagtaatccttcaaaccagacgttacagccagttaaatctagtggtgtcccgtcttcgttcttaatattgacaaaaacttgacgcatacttcgctcatactgacgcgcttggacccagttagtattactgccatcaaagttaaccttgaagtcttgtacattgtcaacatgcggacgccggtcttgaccgatcacataagttaaagtttgtgacattaaatcattcctttctctttcaaaatctgcatgacagcttgttcaaccgtttcatagtcggtccctaaagccacatgctcaattttctttttccacgcttcttgagcctcttttagttcatctcgcgtggctttttcttgttcgagttggtcgagacgagtattaatctcctcgagtagcctaatcaattctttatactgcctgtcacggagattatcgtctttgttatcctcattttgaattatcgttaaattatttattaattgctggcggaattttcttccactctgcaaatctagattagtttctaaatccaaatgaccatccccctcctcacttcaaactactccaatccgtcactctgtaacctagatttacctgggcccgtgatacgtatgctttatcagatccggaaacattaaaaaccagccttcctttagtagtgccggctggaattttaatgttaactgtgccggcggattgccaggcgccattattgacgatatagacaatattcgatttgccggcagaactaccatcgctcttcaagaactcgacataagtagtagcggaacttgaattatcggtcgcatttaacttagccatgagacgacttgagatggaggagacaccgttgaggttaaattcattgcttctgagagtgccttgctctacttcaattactggactgtcattatatttttcgctggaaacagttccgccagtcatcatagttaccaaattatgctggccattttgcatccagtaaatattctggtctactgcttccatattcttatccgtctctttcttatcattcacgacttgcgttaatgacttggattgctgatccatgctatttgctaatccactaatccggagtcgttgttcttcaagagcttcttgtagacgtttagctttctgattttgataatctaaaatagttgtttttgaattatttaacgttatttgattatcttgtcccttagcttccggatatatcgtataaccgacagtcttataactacctgaatatttatctcgcgcaagtactcttaaaatttcaccagcaacaggtacaaatgaatttccctgaagcgtgacttcaatatttaaatctggatcaggtttaagagtagttaaggcatatttacgcattgcatccgcatcttgaaatctttcatcaacaagatcaggtccaggatgttctccccattcgtcaattgacttttgatcaactaccataaacggttgaaaataatactcttcctgtgattctgtggttgtatcatttccgacagtatcattggtttctttaccaccgataccatcacgaataacttgtaagggatcaagccaggttccatcatttgaccaggcacttttcaatgcagtcattaaattcttttgcttagtaattccaatatgaagatggctagtatcacggtggccaataacatcccccgtcttaatttcttggccaacttgaacagtaatatctcctcgattcaaaaatgcttcttggtagcaaattaaataatcattcgacacaatagttatatagttttccagtccagcaatgtatccaatatcctggactttcccaccatgaatcgcatgaacatcgcgtccaggatgatcgacagaaccaaaatcaaggccatcgtgaaaaccattagttcgccccactccatcttgagggtgtgttccaaaagtttgccccaatgaaaaatgaccttctccaacatctgggaaaggccatccccacggattaggtggtgaaatgatcaatttatctttcgtgattggggcaccatgaggactccaaccagtaacaccattaatttgtcctagtgcattaggaatattgaagaacgcaattaactggtcaaaaccctttaagatatttgtatagggctcccgacaataagtattaaaagttcctcgcttaaattgaagtaacccaagcgccggaccagaaccatcgccatcgggatcagttcctggttgcggaatcgtctcgtttccacctgattccaaatgaatttgtgcccgtaaaacattaagctgctgagcattcggttttattccataaaagctagcagcatactgaataactggtgtccaatcaccgttgactggctcagttggtccattagcattagttccacctgtcccggtataaacagtgtgctgaacctcatgcttaccaccaacacaacgaatcatattaataattgattgactgtcccgagtagttttaactgactttgcatcccttggaaaatcaatcactcgaccattatccttatagaactcatcttctgaataaactcgtatcttcttgttatccggatatataactgcacttggccataactcagtaatcttactaagcatctctttaccactgccgctatcgaacttagaagttgactgcttatcaaaattaccatgaacttcatagctaaagcctagcttatttccatcaatccaagcctttagtaagtcctcaactccataagactgatccttactagcattactatcctgattgttatttaaggtaaggtcacttcgtttataaattcgactaatctcattatagacatgccaagcagtgatatttttcgtattagtatcaaagttttcaacacaattttttacaatatattcctgtccctcaagcacaatcgaactttcaacatctaatggatcatacaatgctgaatcgtaatcaaatactgaaaaagtcaattgaaaggtcgaattcttagaccactcgctttgcattgttggccagagaataatgtctccgattggctccttagttgtctctttatgaggtgtcatcaatactaaactaattgtcctcacctcctaaccaagatacataaatgggaaactgaatgtaatttccaaatcatctgcaccagtaacttcaaagtcattctttccaggcgctaaagtaatatacccataatcggtattggcactgtctgggttattattcttaaatgttcgccgtccctttagcaagagagtatcgtttccagatagattttgattgtacgtccaagaagtattagtagttgtattctttactgtgaattttccaccattatgcttaatagtaatttttagatcatgacgctgttcaacaggatcgattgtaatatcactatcgttaaggatagaaaacttattctggcctttgaaatggtatgaaggagtttcctcatccatgttcatattcaagtctaagaaatcctcatctttcatctcatccgtatgcaatttactaaatcgcattccgcttggattttcaaaaggcacttcaaacgtacaatagttaacttcttctggttcgcttttaatctcaaaggaactagcccgacagtaacggacaatatccggctcaactcctgttcttaacctaaagattcctttttgtgcaaaaacgcgataaatctcatgctttgccatcttaaaatcttttcgatcaaagaactgcaataagaacttagcggtgatcgtcgtttggccataacgggaataactccaaatttgaccatcttgttgggaatcatcacgataattattaataacactaggcgattcagttaagccaagaaaagttaagtggtcagtaatatctgtgctggccacttctttttgatcatcaattttaatgtaaagaatgtttacagcgattacgaccacctcctaaagatgttgattatcaaataatgcttgatcagttccttcaatcccataaaactggttcttgtcaaaggcgccggctttaattgcagaaagttgagctgcatttaagcccagcattgtcccaaagcggttgagcatctggtccatccgatctaacatctctttttgcattccattattactttggccaccgttattataattatttacaacttgggtgctttgcatattgggcttaaagttagttaataccgaaacagcatcatcagtaccattagcatattgtggtaagtgcttaaacatcttagcagtatcgctagctttaacaacttttgttcctcgtggtgctggaaagactacattacgcccataaggaataaatggtgtttcacctgggaattgaactaactcacgaaagacggggccaggttgatcattaacttccatcaatccacctttatggtaattagttccctgagcatgctttgatttatgaaaaataacattaactgttttctcaatagtattaggtatactcataaaattatggattgcatcaagtgctgttttaattggcccagaagctttatcattagcttttgcaatttttgctggtcccgtatttgatccagcaaaagcatttacaccattgcgagcactatacattggtccactagcattatcaacggctaaagcatttttaggagcgccaggatttgaactagcaaaaacatcgacaccaccagtagcatttctcatcggaccactagcattgtcaattgccagtgcattctttggttctcccggattagcatgacgccaagattgaagggcatcgttagcagcttttagatttccactagctttatcatcagcaatgatttgttttgcagcactaaccggcatccccttccacagcccataatcagtgatcagttgctgtagttcgggtccacccttagcatttacgattgcttgctgttgcttaggactaagttgattccagcgaccaattttattgagcgcatccattaatcgaccagcaccctgagtagtaaccaaagcacgttgttgcttaaacgaaagactattccaaacaccagcctgcactaatgcatcaactaattgtggagttcctttagcgtcaataatcgcttcctgttgttttaaggttaaattattccactgtccggaactttgcaaggcttcataaattggcttagttgccttattagtaattactgcttcctgttgttttaatgacaaggaattccatgcaccggattcaagcagaatgtcggccatttcttgcttacctttagccttaacaattgcttctttggtcttaagatcaagattattccattctcccgacttctctaaagcttgaacaattgtttcactaaagccgtctttcaaccaagctttctgctctttccaactcatgctatcccatttaccattttcgattaatgcagctgccaccatttgttgagcattggtacttaacttaccttcctttttcagaagtttaatttggttccattgatctttagaattaacagccttattaacttcctcctgggcattagtccgaactttaccagttttgggatcgaaaactaagtcattccacatatcagcggcttttttagcttttccacttaatttagtagtatttaccgctaagctttgtaggtttgtttcggcagctttggattgccgcttaatctcatcagtgccatctttataactaagtcccatactttttaggtcattcttaattaatttagtactttcaccattagcacgggccaggcgaatatattcggcagctgctttattcgtgtaatctgttaatgctttcttattagcacgcataccgaccttatacagttcagaatcttttccgtagcgtttagcaagcattgaagactgcttcttgtattggttttccatttcagcagtttcactggttatatctcccatttttgttgagcgttgttgcatagacatatgcttaatatcgttattaaggacagccattgctttagcacgcttacttccacttaatttaagaattttcatctcatcgttaagcatttcctgctggttgttctttaacatgactcgctgagtatcatttaattgtgaaacttttttattgtggtcagatagaattgtttgaacacgctgattggcattatctgcatcattcacatatgaattatattgttttttctccttttctaactcatcgtcaatagctttagatatttctggagacagacctttttctgcctttttggcattagcaaaatgttgttttgcactattttcaatattagtaaactcacggtcaaaatcagcagctaatttctttgttgaagttgaggcagcaacatccatatctgacagagtgttctgaattccttgagaagtcgactgcatttttgataaagccttatcagcagctgcaccaacatcagatccccaacgattcgttcgttgtgatgattcgacagctttcttaccccaaagctcccaaacagtaattccaccggcaatggctaaagtagcaactccagcaacagcggcaactgttcctaaagatactccagccgcagcagtagcagcacctgcttcacctgcagctacaccggtaccttgtaaagcgacagtcgcagcaccaacaccgttagcagcttgaaccgcccgaccacctgcaccagtcatggttgttccaaactttgcagcttgaaatgttgattttgaaaaagctgagccaataacgtctaacccactggctcctagtttcattgcagtttgtacacggccgattccggaagcaatttttccaaaggcaagaactgtcttcccagcaccactagtcagtttacccaatgctaggaacaacgggcctgcaccagcagtgaacagggtagttgttacaattgccttctggacagctggtgataaatcaccaaagccatgtgcaagtctggaaaggccttgaaccattggaataatagatggtaagacgtactttgccatatccattccagcgttagttaaagattccttgaagattgctaattgtgctttaggagattgaaggtttttctgtgacaagtcgccgatataatcccgcttggcagagttttgaacttctttattaagttcacgtaaccgattagcgttttcggttaaaattgccccagcttgttgtccagttgttccaaataacgcatgaaaaatatcattcttttggtgaccagataagcctttcatatggtcatttaacgtcttaaaaatagacgacattgattttaactttccactcttagtaagaaaatctttagtacttaaattaatacttgctaaagctttttgaccattagcggttggcgtaattagtgaattgataacctttcgtagaccggtaccagctttgtctgcttctagaccattattagacaagatccccattgcactagcagtttctgagagactaaaacctgcttgatgagcagttgagccaacatatgacattcccacaccaagtgattgaaaatcagttgatgtggcatcggcagcataggctaactcatttaatgttttagtagatctacgctgcatgactgtagcattcttgattggacgtcctgctttatcagtagccagtccaaaagattccattgtctgcgaagcaactttgattacatcattaaagtcatccccagtggccacagatgctttaagttcgttccgcattactccaattgctgctttagatgtataaccacgctttactagatcttgatacccggcagcaatcttttgctgactaacaccgtactcgtcagaatactttcgggcatctgcagtcatcgttttatatgcggcattcgtttctgcagctgattctccggaagttcgaataacgttcttgacctttgtcatttgatcttggaagtcaacgagtttcttagcggaatatgttaaccctgccgcaattggagctgttaaataagtcgacatccctcgaccgacacctgatattttagaaccaacattggtggccacatttccaaaatgttgagtgcgattagcaagttgtgtccacttattcgactgcaattcaatatcacgattaagagcttgcattcgtccacgtaattgttcaatttgcgcagacgttttattatattgggttgctgccttagttcgtgactgctcgctcctggtagtatcatccattgctttcttagcattctggagttgcgcattataattgcgcatttgttgactcatagtcgcataagcagcacgcatattattaatacttccaccggatgctttcagtgccgcttcttgcgcacgcaaagcattggctgttgatttaatttgcgcttttaaaacaccattagccgctttaaacggatcaatatccaaactaacagttgctgccaaatgtcctaatgattgggtcattatttaacctcctttcctagaataagaatgggaatgctttatcaatggttgtctgcttttcttcaaagacgtaattcattaatttcaaatctgaaagtgttagcttactgacctcattccatttatatccatcgcgcattttatttttaatgaaatctgtgagactcttgattgaatcatcaatcatctcaacagttatttttttggcttttcgttatcctttttctcttctaagtcatcttcacttagaggagaaccgagagtttcattaattgcattaacaatgctaattaacccttctatagccgtaactcctgaaagaacatcctttttagtcaatccattcttccaaaaattagcagcaaactcagcccgtaaacttaataatcgttcattatctttatctgttggcaattttttgggatcagagtacatcactatttcttgacgttgaacctttaatgcatctaatagattttcaagcattggggcttcttttcgttcatagattgtttctttgccatctgtttttacttttaatttatatggcatttccatatcctcctcatcgtctcacttaactcgtctctgtctgattaattagttaccctttatcaacaacagtttctggtttagtatcttttgtattggttggatcagttactggagcttcttccccaaagaccattgcatggaacttagcaaaatcaaatccttcattatcttcccgaccgattaaaaggatggttccagtatccgcatccccacgcggaacgaaattaccttcaatttcatctgcttctgggtctggagcaccgtcctgagtcttgattgaaatacctggtaaggagaacatccccttggttaaaccaacccaacaatgcttcccgtttgaaagctttgtccggaacatagtagcaacataatttggtacaagattcttagtataaacttctgtaccgttctgaatatcaattccatacaagtctttcttcatgatggaatcaatatcataaaggttgatggtttccttagcttcggtaattccaccagaaagaaccaagtaagggccgtcatcggctgctaacgtctttaattcgttagtcagctccagcttaacttcacttaacccgctcatctttcgggtatctttaatcttttcgttctcgtctagcaccccatattcaaaattagaggccccaaacttagcaacttttgcatttggtgttcccattaaatatcattcctttcttcaaacccttcaaagttagctgtgaccattatgcaattatccaagtccggatccggataagaattcttgtagtaacgttcaaagccatgactgtggagggtttcatatattcgttcttgaatatccattagccggtcatcattctcttcacgaatccaaaaatcaacttgtacacgtgggtattcaaaaaagcgagcattgtcactgtaaattgcatcatccccaggtaggggggtgatccgaatccacggtgctgaactcgctttaataaatggatcatcaggcgtactagtaaaaattggaacatatgataatttatcttgtcgcaactcatccatcatcacgactaggcactcatcattcgttagataatcggctacttgcatctctggagttttcatactttcaagtcctcaataaatttagccaatattttcttcttagcagcatttcttgaatcttcaacaaagtgttgtggatcttgcttagcagttccagcatcggggaagtgagcaatccatcctttatctttgtcataaccaacatcgacagaataatctccaccgttagtcttgagattaccgtgtttagtatgatcttttaaaggagtcttgcctgaatgatcagagcctttagaagccacaggcgtccattttcttaattcttcttgaaagactttagcaccatcacgggttgcttttcgtgccttcttttcttccgtcttttcaagtttagttaagttagcaatcagctctgcttcaccggtcactgccattttggacaacctcctgggcggtaatttttgttagatctcgctttgcataatcaggatccattcccgtgatttcataccattttcctcgccagttaattaaccaattcgattgaatttccttacgagttttgaaagcaattaaaaacgtgggtgattcttttctgaaccccacgtttgaactgttttggacaaattcacggactgacagcttaggaacttctgcccacacggtaaattccttaactttctgatccttgatcggtcgatgagtttccggattgatccccatttggactgagtaaaatgttatccgttccgtcatgttccgtagtttcatcggtattcacctcactacttatttgattaataaggccatcaattcctgatgaaagaactggtcggtaactatctgcagtaattcctcgctcgtagaagtcttctttcacctgcttcataagtgcaattttgaatcgcggttcgtcagagtagtcagcaggcttactctcccatttaattgcccttgcaatcatcaatgcggcagcatcaacaattattttaagaatttcatcatcaaagtcctggtcaattttgcagtagttttttagattggcaaagaattgttcatcactcgagaaagtgtggtctgtttccatcctactcacctagctttgctaacagttgatccttagtatcggttgaagtataggcaattccatgatcatctaagtactttttgattgtgtctaccgtatcagcactagtcggtttaacgtccgccccgttgtcggacggcgttattttgacgctgctgatggaccagtaacaaagtaaccagcgttttcatcggccttcttcacatctaaacgaagaaccgcttggagatattgaccataaatgtcattatcaacccaccgtacctggagatcttttcgatttgctaaaataattgcacggtatggatcaccaacaaaggcatgagcttcaccctttgctccaaataagtcatcttcaattacagcaacgttgattccagagaccgctttaccagacggactagaaatactatcttgaagtaagtaacgtccattcttatctttcaatgtatcaagccagttgtagaagctttggctggcaataatcatcttattgtaagccacatctaaatcgacattccaaattttctttaggtcatcgattgcattagagccatcaacggtcttagctgaaaatcccttaaaaattgtagcaatagccgcattctttgtatttaaggattgttcttttgcgtttcgagcaactaatccagttaaatcaattgctgaatcatcaatcgattcttgtgaaataggaattgctccacgataggtctcaatttgccatgctaccttaagaaattcaggtttttgaagatcaggattctttgcaagttcttcaacagtatgcatttgagcagttgcctttttaagaattggataactaccagaagcagttgtggcgttaaatacttgaacaaattggctaagatcagttactgttttaatttcattttcaggattgtaaatgattgattcaggaatagtaacgcttgcgtctgaagaagtaattccagtagtaccatcacgatgttcttggtgaagatatgcgttgaaattacgtttttcttcattttcgtcctcgttattttgagaacgcttatgaggatctggagctggattacccttagctgctttacggtaaagcttaaggtcatcttcaatactccgaacttccttttcagcagcttcaatttcagaacgtaatgacttagctcgtgttaagtcttcatcagttgcgtcttcatttgagagcagttggcgcatttcattagttttttcgttaattaatgctcgcttaccttctttttgagcaagcaattctttaattttttcgcgaaacatttaatttcctccttcgagtgtcttcaataattcttgtcgttctaattcacgtaacatctttttacgtttctgatcagtagcatctctattttcttggctctgcatttgcttaaccatattgatcgaacgctgaccgacctgaacttctgtatccggataagcaggtgttgtaactactgatacatcgaacaaacgatcaatttgtcgaatggttcgttcataatcaactccatcctggtcagattcttcccaatcttgggcctcatctgtgttggccaccgtaaaagcaaagctgcattgattaataacgcctgccttgatattggcgatcaaatcacgcgcaaatgatgtatcagttggcttaacagtgaatttcaagccaattgcatcagaagataaagtcatgttcacccctgatcgtcccagtacctggttaggatcgtgattgatcgtcgctactacatttgacatatcagcgtcatcgaacgctcctggagcaatttgctcaataaagcgagtaaagccacccaaaacttcggatggcttattgtatttggctgcataaccttcaattactggttcatcatcttcatcagttgccgttctcatctgaattggcatcattaactgtcgagtttccaagtcgcttgtcatcgattccacctcccttcgctgttgattgtttctgatactcttcttttttatcaaggaagacagtattcaaggttgattggaaacggtctaagtctggattgtcagatttgactaaccccatccgaactcgtccttcattaggagtaatgacgttatttgtaactcccttttgtacatcgtccattgacatccctgtttctttgcgtgtatcaaattcgatgtggcagttatgacgttgccgatcagtcagcattgtcatttccaaattacttgcaatcggcttgaagtaataaggtaaatcagaagtaataaagtcttcatttaattgtttaatcgattggttaggactattaactgctaatttatatgctggaatatgcaacgctttggcaatttgagcagttgaatagttgttgctgttaattagttgcaaaacattggtatcaatctcaattggcgagtaatcgaatgtatcatcagtaacgattgggctaccggcattgctattagcttgtgcatattcaaacgcctttctagttttaagacgcgcttccggacttaacttacctttagcctttagtaatccacctttaagacctgacttaaagaaccgccgtaaagtcttaattccatcatcctgtaatccaatctcatcagccaaagacaacaacggcgaccggccatgaataccatcgtaggtaaagaacataaaatgaattacatcttcagccggcacaacgattgtttgaccaccgcctttttgattgataggtgtaaattcgtatttaatattcgttacatcagaatcatcaatataggtttgcgatggtggaaaatattgtatttctaacggtgcttttgtatgaggatcacgaattattcttgaaaaaccatccccagttaaaattgcgttaactgtcattaggaaacgccaatgataagcagataacatatcgtttgggtgcttattcagcaaataatcaacacttttgatattctttactgcatttttaccatcatccaaaatgacaatcggaaatcgagctacattactagcaacatgagagactgcagtcagcacatcagagtttctaagagcaccgattccactataagatggcatattgctaaaccccggaagaatcccctggtcaatataatcttgtgcccattcgcgtttctcggtatgaaataacactcagcttcaccccctttcataagagataaaagccattacgaataattcaattgaaataattagtaagccaatcttcgtggaaaataaaaagcctgtaactgctaaacagatacaagctaatatgaacagcaaaaccggttcgtttagtttccagaatttcatggcatcacccggagaagaaatttcaagtcttcatccgtaatctcaaatttctcaatatacggggcaagctttctcagtcgttccaatcgtcccttgatttcattaagtgcgggagttacatcaatcttcattccttcttcaccgtcgtatagatacttagccatgtctattcctcctcgattcctttgataaattcaattgcttccttagttaaggccaatggatggaaatattctccatctgaacagtcattgatgatcttcccttttaataggtgctccacatcatttttagtgataaaggtggtccagttgctatcgttgccatattcatctagttgcttaatatcatggctaaatttatctttttcagaaaccaaagtcatcattaaacacatcctcatctgttaaataatcatcaatattttcacggaaacaaattgcatatgcgtctagcaatgcatcggcagcatcaatcttatttgaataacggttcttatcaatccggacaccattgttatctgatttaaggatcgcgttagccattgcgccagttaaaatttcattgtcagaatgtcgaactcgcttatctaaaatatcatccctaaattgcttggttggcattgaaagagttagtgttccttgacgaacagatatctgttgccattccggatgacctttttcaatctgagttaacaaggttccatattgtgcggggtcataacaaattgcctgaacatcaagattgtgttctctgacaaagccatccagccattcatatacccgttcaacatcaataactccagattcaagcttcgtaatttcacactggcccatcccttgcaaccggacataatctaaccggtctgctttaatctttgcttccaaaccatatttagtaccgacaaacgcataagaatccgcataccaatacccctcttgaggaattaaccaactaattgcataaaggtcagatgatttaccaacgtcaatcccaaaccaaactcgttgaccatcaatgtcaattggatcaatttgagctgcattccaagtatcaatatccatataactatcctcttcggcttgtcgccacatattaaagttcttaactagaacagaattctttgtccctttctgtttagcttctttccaccgctttgccaaatatccatatacctggtcttgcaaagccgggacactcagaattggattggatttaatccaggtacttttatcatcaacttctgatacattatcttgttcagcaatgtaggcaaaataagtatcatcagtaatttcacctttcaaaaccttcgttgcatagggatattcaattgtatgcattggaacattcaaatcaaagccggctgttgaaataatcatgataagtgagttatgaagtaaggcctgaccggattctagtaattccatcatttcagtggtcttacttgcagcatactcgtctaggattccaacatgaggttcaaaaccatcaaccgttcccgtttccttggaaagagaccgaacataagaataatcatcaaggttactaattaaatcacgattaacttttgtcccacgttttgtatcaccatcactggaacgtagagcattgaggcgtttcttaatcatattaaaaacgatgttcgcttgctttttatcgttagcggtacaaaatatttgccgggagaattcaggtgagttacccatcaagaactcatacaatgcaattccggaaataaggatcgacttaccattttttcgtgccattgataacattccttttcggaagcgccgttcagatggcttgtcttttttccaccagccatacatattagcaataatgaaacgctgaaaatctgctaaaggatacgcccgcatcgtttttggatccggaagtatttccatgaattgaataaccttattagcacgttcattatcataaaaatattcaaagtcatcgttatccgcctttttaagatcatttaagtacctttttgcagctaaaatcacctttttaccagcaactattttgccggccacgaccttttcagcataatctttagcgtaattcatcatgaaatcctaaacttatcacgcaaggattgatgctcttccttgtcagtttgtggcatgttcatctgcagccgcgaattaacattaagcccaagatcagatgcaagaccctttattgccctggttgctttatcaattgtcttaattgcgttattgattttagcaatgttctttcttttcttggactgttccttatttaattgaacggaagcatctttataaatgctgtaccaggtacaatacaattccaattcgctccggtccaagttacgcaatggcagctttccgatagaaccaataattcgccgatattccgctttggccaccttatctaaatgtgccggcggagtcttttgcaactcaggtaaaccatcggcagccataaattctgccttatattttgcttcttgttcaaccactctaaggtggcctgttgactgcgataataatttttgctttcttgccaaaaagctcacctccgtgctatgataaaagcatcaagaaacgcatatcctcaagcttttaacagcttggggattttttagtatcgggcctaaaaatgaaaaattgttggaatttatcgtgcaaaaaagtcgatgtgcgttccagcgttttgaaaaatctaacccccgttcaaaatgaaggggggcttatccattcttgacgacccggtagccggtaaaatcagccgttttgaagccattcaaaatcttctgaaatgaaatttgttctttccgttcacataatcgttcctcacagacgtttggatcagtcatgataacaatatgattgattcgatgatagttactaagcaatgtatcaatccgcttatctggtaacgtcttaatgatccaaacattattgaatgtctgttctgcctttagctttcgtaacatctgatcaaagaatagtgtaatgtaatcgtggatgtcgtgattgctttgttgcattggtaaaccagataacgcatgcattagctcatcataatcataaataagatcatgctcagtcatgtgtcgatttacatatgttgtcttgccacttgcaggcaaaccacaaacaatattgatattcatataacgttccaatcctttatgatgtttcatccattcacgtttcgttttaatcttatgacatccccgacagagtgattgtagattgtcattattaagtcgatcactccaatcgtccttgctggggatgatatggtcaaccagttctgcatccattccacaacgctgacacaatccataatcacgttcaagtatctcttgtcgcttatgcttccattctgttgagtgatagaacttaacgtaatcattctcttcaacattacgatggaaattatatgctttgtcgttatccttgcgaactatcttgtcataggataccagtgttggcttcccattgataaaggttagcttggttggtttcaatatactcatcccctttctaatatgtatgagggcaaaataaaagacggtagccatttgctatcgccttaatcatttaatcttttatgtattagttcgtctaattctttcaagtcgtcatcagtagctaaatcacggataaacttacgagcatatgaacggtaacgatatatccgattcttatccttgttcttatcgtcccacttcttcttggctctttgttgtgcttcactaaccataacatcgaccttctaacattaatatggtatactatatatgcaaaaggacaagagctgctacctctcgtccctttgcgatccagaaaaacgagtttgctggctaaccgctatttgcgattagctttttttattatcgcatatgcaattgcaaagttgatacttgcaactgatattgctacgagagcattaacgataactgcatcctcaggtttccagataaactctttcatccattgaactcgcctccatccggatagaaaggctgtcgccggatcgctgtagaatattgataaggtcgcgactccttacctcatctacatctattattataccttattaacatataagaaacaatagcaaatcaaatctttttgagtataaatttagccgacaagcgttgacctgtcggctttttattttgtattttattcatgtgtcgttcggctctacacagcatttgatattcctgcctagatgctaccaagccaaaccgtttagtctgaaacattttaatcctccaaacaaaaaagccagcaaacattagcctgctagcttataaatcatttattaacaccattatctatgcgcaaaatttttttaattctattgataacttcctctgtcatctttttgtatccgttgtaattttcttcatagatgatcgtatattgcgttgaaatgtcaaatggtaaatgatttttgtaatcagtttctaaactcttcttactacataatgtaatcacgcttttaccgatagtgtcacatattccaagctcatagaaaacattaggatttcgattgctaatatcagcaataataaaacttgaagcgcaaatatcttgccaaatattttcgataatattattaccacgagttggatcaaatcgatcttcagactttatcaattcacattcaagcttgttgttactaatctcatctttaatcgcttgcattgcattttcaggcccgtcctcaaagggcaaaacataaaatccttgattaggttttacaacgatatctctagcctgaaatcttgggttaaaattcattattgatcttttcctttcaaattcatccctaatttgttgacgcgctctcataaaacaatgaagaaacgaaaagcttgatcctgatacattaatactttcattttttaaaatggcttgcattaaatcaaacaaaccactaaaagcttttagcttttcagttctgcttttatcaaaattttcttttacaaatgtaagactgttattaaattgactaatattcacatcaaagtagcagtcaaatttaaagcccagctgttgtattcctatattgttagcgtcctctaacgaaggcaattgtgtttgttcatgtatttggtatgcaatagtgttaagctcagctattgctttttcatcccctaagaacacccgaaaatcaactttactaaaggacacaagaacatttttaggagtcataagtgaataattaaactcccgtatatcaggatccaatgctaaaaacaagaaatctaagaactcataaagtcctttgctttcaatgtcaaagaatttttctgaatccttaggcttatgcaaagtattaaatgtacttgaataatatgtcaccttattttcacctcaacactataatacaaaaggccagccgtaaagactagcctgaggtaaaaataaaatgtagtagtttaacgtcgttgcggacaatcaaggctaatggaagaaaacatctagtaagtaggtgcttcctcctttcgttgattgttgttaaaagtagatgagccttgaatgctgatggacggaatcgaaccgccttctccacgttgaaacggaaacaactgtggtgctttaccattaagctacgtcagcataatacagaaatgcttgcatccactaatcgtttttgaattttgttactcattgcatctctgcattaaatcacggcttagacaaaaaagactatgcaattacgaaagaggagcgttcatctcctatcatagttaaatttgccgtgataaagccgagaggtggattcaaaccacacttttgccacacaagaccgattgtgtgcccatcttggatctcagcaagcagtgcgactcgtaaagcactgcaattgcgaatatcgggaactgccccacaaatattggaccactccaggatacttggcatctagtttgcatattcgcataatcaggaccacgcaatcaccgcacccggtcgtagttttccgcctactcctgtaacggtattgctgtccattcatacggtaatcctttagccgttgagttagattacgtactcttctgccgattacagcacggttgctacgagactatcagagtagtatgtaaatttaatgatctaaaggagatcttccaaaacgcacaaaccaaatttaatcgttaccgtaaatttattttgaagttagttaatgatagtctcaacgtggattatggggctcagacccatcagtcagtcaaacatctgatccacactcaagcttaacaagagatcccgtgtggtattaagcatagaaatctctttccttaaagccagaatcctaaatttgagtagttaaaggcttgctcaggcacaattgggggtcacaaggctacatcgctaaccttccgacaatatcattttcgcacttaaaaacgggcttgaagttcactaatagttcactgtttgttcactcgttgttcacttttttcgtccttatatgcatgaagatcttctagtaagtcagcatccccgagcaaactagtatatctttccagcgtatccgcaaactcactacaagcaatttttaagtaatgatagtagcgcgttttttcataaccaatttgattagctacttcccaatcttttttattctgaataaacttagcaattaatattcgcctacttctaagactacatgcgttgagtgcttgagcgattgtctcaaccaagagatggtaattagcaactttaaccatttgattttccattgaattactagcagcacttgctcttggcattccgtcaatttgtggggacgttagcttaattcctccacctgctaagcgacataagcgtgcatattcgtccttaaagaaatagcgaacattatcagtagttccgtcaacatctaattcttttaaaagccccacttttagcactctccccattttgatataatatttatgtttgataatttgaaggagcgtgccattactgtggtgcgcttttttatttagtatctagataatactagaacaataatcaatgacactaccgaaaagattaatgcaaaagattgaagattcattattgctcatccctcagataaataattcttgcatccaagctttctaaataagcttgcattgaccttagctgtgcatttagcattgttaattctaatggggatgaaagctttggtccctctttaacaataaattgagctagccgatctatcttacctaacagatcctttcgctcctttgataattgctgaagtacttttcgtttacttgtcattgtattttctcacctgattagttcgccgttcctcgaagtttgcttgttttatcgataggacagttcctaagacaaaaccaacagtaaaaatcaagacggcgccgataattaatagttccgtcatttatttcatcccctcttctgctttttcttcaatttttctcaattcccaataaagtgaagaattggctaaccagtgttttttgccacgatactttgttcctttatagaacggtagctcaaatcttcttgctaggtctttcatcattaagcgattaatctaatacacttttcttctctcatcgctcttcattaatttttgatactcaacaaggattttatgtaaatttcgtcggttaatcttcatggcttgcttcctcattaaccaatagcaacgagtttagccatatcatcgtaattaattctgaaacgctctaagtggccaagattaaaccgagtaacaataatctcgtcaccgtaaagtgattgattaatgatctccctggtagtttctcgtactgataatttaagaccgttatgaaaaattatttgtgtccgcattaagcaatcaccggatacttaatctcgccaaatgtttcttgctctagttgctgaatgtgcttcttaatattattctttgcttctacttgccactggttgttatcagccatgaataatgctgattgcatcccctcacgcattcggaagataaatttgcttgctggctgatcaacttcctggaatgtccggaaaggaattagctttactggattaggaaccttcacttcatcaacactagcaacaccagaattaatctgaacactttggcttacaccatcatcggtttgttggtgaatgctttcatcacgaagattgctaacaactttcagaatgatattccggtcgtcattctcctcaaaatgtgactgcagcataataatcatgctttcctgatctaagtaactttctaagttaagactatcaacgactgcccgaacctcagcaaaacaaggacgttgaccatgaccatttaactcgccgactacttctactttagtcggactaacaacatgaattttgatactgtcataaattgcttgagtctcactttccagccattcaatcaagctagttaactgattcaattggaggggatgggcaataatcggatcattaagcaatgctgcatccccatcgtgatcaagaagatattgccgtccatttaaggcagtaaaaagattgttgccattagcatcatttacgagttgttcaaattgggttaattcaccgttaatctttgtttccatgagttagttctcctcctcgtttcgttttatgatttgtttaattaattccatacagtcatccatgacggtctgctgactaaagggaggctgtccggcatgagcggtatcaaagccaatgaaacaaccgtttggcagattagctaatttaccatattcaggagtccatgttatgcctccatatacagataagcatgattctgtttctgataaatggttgtaatagtagtcacttggcaataattcaacgtacccacaatagtaatcttgaagtggtgagaatgaagtaggtattccagcaaattgacgcatttcacgtataattactcgtcgacctttgtattctccctcaaaaactgttttattaatatttggctcttgcatcagttagttctccttcttttgtaaatcaataaccttccgcttttcttctttttccacttcttctactggttcgccagtgtccatcttagccttaccatcatctggatcgatgtaagtttgacccttaatgcctgacttcaactcgttaacgtgaactttaccgttagtgtcacgacctagaagcatggtagttggtacaccaacctctggagcaagggtggtcttaacttcaaccgtgacatctgaggcatcccgtttttcattaggggctaacgtgatattaagttgtaccttccgctttttagttgggtccgtgtttggatcaaggatattatctgctacttgttgtaatgcacggttaagcttaacttgcacaccgccatctgcaatttccgataaatcaaaattaattgctttcttcttactcataactcttctcctccacttcaataaacatttgaccatcttcacagtaataattaagtttccagccattgcgtctcatcaaatgaattaacttctctgcaattttttgcccgtcaatgccaagattaaacaaatgataaagttcaggctccatcacgaagtcatcacagcccagagcttccatatcaatggggagataaagccgattgtaatgacccttatcgtgtagctgatgagctagattaacctgcatgatatcgaatagctgatcttctaacatcttttgatctccctgccgccgtttagcaacatattcgtgtcgtaagtagttctttaattccattactcctcgcctaccttttttctaaatttaagtatttcttgtagccgccaatcatcagccggcaaaagttcttctgctctcagccgactgtatttccaaaattttccgtcaaatgtgtggtaattttctagttcatcaagggcatcacttaatttgtctgttatgaaatcagtcaaacttatcaacccattcggaaatgttataaagctcttttagctccgtagtgtggggcattttggtaactccactaaacgctaaaaagtcacttgtatcattgcaaataaaataaacatcctttgctttcctgcttaacgaatcacattggattgctactccattcatccccctaattgccatattgaatagcaagaaggggattgctctatctgacatttcttctacctggtaccaataagctctagggtcataagtgaagattgacaagaattttaagttagggtcagcatgtaatgaattaccaactcgatcatttgtacagtcatcccaccagcgcttgattaaaattccaccagtccccgcagctatctcaaaatagtggccgttaaacttatcactatcaactaggctattaagcaaggtcgcaatgctatcaggggtaaaatcctgcttcttacttttccgttcagcctgttcgtcttcaaaatattcatggaaccagtcaaactttaggtccgttgaaacttctaggaacttcttaaagacttctggacgtttctgattatcaagcattagctgcagcattctttccggggccttatatgactcgtcaatttctaatagcttattaacggtttttgtatcaaactgcattattccacctcaaattcccgtcattacagacataatcttgttgttatcctcgtttgctagcttgtctagcaggtggatatatactcgttgggttgtttctgtattgccgtggcctaaccgtttagcaacactttgaattgaaacacggttagcaattagtagggatgcatgagtatgacgcaaaccatgaactgaaattggtggtattcctgcctggtcacacatttcctttaactctttattaaacactgaattataaatgtgattaccacctcgggtattagtacgagagtcactagcataccaatgagcccagattgactcatcttcttttactccatccaggtggcgttgtaggtcagttaatgccttaaaatcaattaggatttgcctaacagaatacttgttcttagtcggcataaagtccccaggtttaacttgagagtaatctattttcttgtagttcagtgtcttattgacgtaaatagacatgttattcatgtcaacatcagctggggtaagcccaaggacctcagcaaatcgcaagccagtacgtaacgtaaaatcaaagaagtcaccatatccgctttgatcagcattaaagacttgttcaagtttatgaacttcatcaatttctagccatttcttaagtttctttttcttcttaacttgagaggtaatacggatcttgtagcatgggtcacgagaaatccacccctcatagaccgcatctctgattggcgcttctagtaaacgatagaaattacgaacagttactttttcgtgcgtttgtccataagcattgatgagcttttgtatatcagctcgggttattttatctagcattaagtctggagcaagtttcttaatttgtttacctgtcaaaatatatctttggtaagtgacatcacggacatccccgtatttgtaagtctcataccattctttgtaatatttccagaacttaatagctctcttttttccaacttgtaccatcgatgcttattcccccagatgataaacaggaatcttaggcttagcaccagtaacaacaactgacttaccgttataaacatcattatcatgttgaacagccgcaagattagttaatccctgttgctgataacgatttaagatcgaacgtaagtatgcaaatgttggacgatcagcattctcaaacatggaagtgatggcaaatgctaccacgtcaccaccaagttcattcacgaacgcttttaattcgttttgtgattttggggattcgagctttttataatatgaattaagagtagtactagtagtagtatttaaattatctttactcttacttaacttaactctatccttacctaacctaacctgaggatccatttcggttccattctggttccaatttggttccatggagttgaagccttgtccctgttgaggttgagagttttcacttgaaatttgatttttatttttggaaccgctttggatacagtttggttccattttgtctccatcttggatacattctggagacatttcgtttccaacttggttccgttctggttccaaatcggatacaaattggtaccgcttattcttatcaagaccaattaatttcatatcatcggtatatatcgtcggagtgtatcggtcctttttgacgtagttggaaactaaccaatccttaataacgactacaccatcatcaaagacaattaaatagtccttctcaactaatgccttcaagtcatcttcactagcaccaatcatccgtttaattgacttaggattgccaacaaaaccatcatcgtcagcattcatccccaaatggaaataaagcgattgagcagtaagccccatatcaaggaacttatccgtctcagtaaccttctgactaaacattctgcgttgtgccattgtgtaaccccctagttataaatctgcttaactaattcatcaaagtcttgagattcgcttagccgcttaaggtggtaagcaatatcttctgctaacttcatatgatggctgtacgtttctgcatgcttaaattgatcgcataaattacaaataaaaatagcttgatcaatcacattgttagcaagtttttcaacttctgctgcagtatctttttctgacatatgttataatctccttgtagatttcttatccagttattggattttgccatcggtgttaccagcgccggtggctttttttgtgtgcaagtcccatagcattagtgaatagaagaacagcaagaatactgctccaccatagtcgccaacgcctacacaataagcaatccaagcacccatcagcattgctaagagcttcgaattaactatttttgttaacgtcatttgtttcacctctttttaatgtttcttctgatatttttctttcagcagcaatggtttgttccgctcatacagcaagctgtacaccagtgcatataacaaacacattgcaataattaatattggtaatccaattagaaatgccacttaatcacctcttattgcggtaatgatttattccagtcaactttatcttcatgttgtgctaaccagcgtgtagcctttcccacatcaattcgtactggatggccttttccagcgttcaatccatagacgcctggcatcttgggcaacaagtacaactttaaccaagctggcgacttatcatgaccatacttatgacgaaattctttaagactaattaacattggtttatattgtttaggcaccaaatcatactgttccttaatacgtttgagcacttcattagtaattgtttggtaatcttgttcatctaaggttgcttccatcagtaatcacctaccttatttataacgatgagacctgtaaatcttcttaattacggataaccacctgtgccagcaagtagttatctaaaaacgtctaaactaacattcaacgcatcagcaatcttacacatcagttcaaaacttggcttcttaatatgaccgtacttaaactcatacatagtcctattagaacgtggtaaccctgctttaatagttaactggtaaatactcatattttgctttttaagttctttttcgacttcatcccacaacatcttgtgatacatctctctgattaatacaatatattgacaccgaaacatattttcgatatacttggcctcgtacacttagcactctattcaaacgactgctaaatcattaagaaaggtggtatttataatgacattaactaactggatctctgtagttggtattctagtttctttaggaatagcctgttggtcagcctatcaaacaaaggtagctgctcaacttgccagtcgtccgtatatttctatttatcttgaagcaattgatactgtctacttcagtaaatatcttgtaattaagaactttggaaatagcagtgcaattattaaaacaattaactttattgaattggataaaagtaataagtactcccaagatatccaagaaggattaaacggactaattaatggaagcatcggtccaaagcaaaaattaacaatgtcgctaaaagataattacaaggttccaatcaaattaagtgtcacttatgctgattccaacggtaaagaatatagagatacgttccatatcaaaactgatatgatgtcaaaaatgttgtggagttctgttactacaggttccgactctaaagaagcaagtgctataaaaaatgcagccgctggaatcataaaaaccattaaataatcataattttgtaatggtaataacataagcgattgcccaaactatcgaagaaacaattaatccatcagcaaaactttgccaatccatattagtcatctcctttcgaggtggctttttctattcttcattactgccatcaaagtgaatttgaaagatcggatagatcaactggctgataaacttcatctaaaatgaaatcgattagttttgatagtcccactgctaacaccaatagcagcagggcttttttctttttcttcttcatccatcattgccctcctccttctagaagttttatgcttcaactgtcaaaagctactctctttcttctattttgctatacttaattcatctccctatgaaaggaggtgattacatcaaggcactcaaacgaatactattacgttttcttgtcagaattggtgcattgttttgctgcttagttttgctactaactggctcttattccgtagcccaagtgtattcaactgctagcaaaggttctgcactttatgaaattgaacactcaaatttgcttataacgataattgcgatgctcccaatctacctagtttggaatttatttgtcatattgattgaagttatatcaatttccatcagcaactataaactttcagaaaagttaacaaatagattgtatagattaggaattcttatctccttggtagtatccatgctctatacagaaacagctgaccagtttcagttacttgcgacacttatctcgttttgcttgatattccaatttcttatcccaaacgactttcaaaatcttcttgttgacataaagagaaacgctcatcaaaagcgggcaaaacacaaaaataagaaagaaaatcaatagcaaattaagcacttagtcacctcccttgggtggcttttttattttgctcgctcaccattgctaccctcctagtacagttttctgtacatattctttaaaaaaataagtgctaattttagcatcaggaattgatagaaccgcactaattgccttaatttccttttgggtaaacgaactatgattgttaagcttaatattcaaagcagttcgactcatactaatagcttctgcaagagccgcttgtgacatattcttttcccgcatacgcttttctaataatgaatagtcatatttgctcatggacacactcccttctgttttttgttcatttttctgaacaactatattatatctcaatctgtcacggagtcaagataagttgtacatttttttgaacattagataatgcgcgtccataaatctgtgctaaaatacaataaaggggtgttaaaaaatatgaacacttttcaaaatagattaaaagaagcattagatagctcaggactatctcaagccgaattagcgagacgagctaatattggccgaaattcaatcagtgactatctaaaaggaaaatatgaagctaaacaagataaacttcatgccctagcacaagtcttaaacgttgatgaaggctggctaatgggctatgacgttaaacaggaaagaaaagttacttctgaaactaacttgccaactaacatcgtttacccgctgggagataattttgagcgcatcagcatccccctcattggtgaaattgcctgtggtgatccgatcacagccgaggaaaatattgagggctacgttgaagagatttttgaaaagcctgttccaaaaggcaacctctttgctctacgttgcaaaggtaaaagcatggaaccaaccattcacgacggatcaattgtaaccattagagaacaacccacagtggaagacggtgaaatcgccgctgtccttgttgatggtgataatgaagcaactctgaaacgtgttaagcaccaaggaaatctaattatgctaatgccagataataaagaattcgacccaattatcttagataaagataatccaggccgaattgttggtaaggctgttcacgtttcatggagtattaaataataatttacgtccaaatactgattgacgttaaaagctgcgataatgttgggggatatgtatgtatactgtcgatactacaggtcatgataaccagattaagaagtttatatctgagttacgagaatggttcgataaagatgaattatatgatggtctttctaatcaagacattcttgaatatcattacgatgaaaaagtttatcaatttggaacacatcctttagactcatatgatataaaaacttcaattagtaatactgacggccactatagggtttatcttagctttcgaaacggtaagggatttaatatcgggaccatcaaggacgatggcaaacttattaatcgccttaatgatgataactacgaaccccgaatctatgttttaggtgggcgttataagaaagtaataattgataaagatggtgccgatcacattaaaagttttcgagaaccatatacttttcaaattgattttctgaaaaatgaaaagccaaaagatgttacatatattaatgacacaacagctcagcaaatgttagaacaaaacaaatggtatcaagccagtcaaaaagcagaaaaaataggtaatacaatgcaatctgctggagatagtatggctggttgcgggtgtcttattactctactagttacaataccagtgattataattataattctatttctaattctttaggactttgggggataaataattgaaaaagaataatcaaaatagtgaattgaagtttaatagaatcatttatgcaattttagctgttttactacttataggaggaactgcaatatttatataccatgctcagcaaaatgaccctgactcatctgagtatgctgatcctagcagtgacgatagttcaacagatagtacagaagacgatgatgttgacgattcttctgatgacgagtctgaaagtagtacagaaacaagttcagctagtgactcgaacgttgatcaagtagtttcaatgatccaaagtcaatttaaggataaagctatagtttcatatgataaagacagcaaagcaattttaatcatcccttctgacagtgaattcactgacgaggttgttgacgttgcaaacggggacggggatgaagaaacttggaataagctaaccgattcaatcaacgatgtttcatctcaaatggttagcaagtatggcgcaaaggtcgcattagccatcgttaatccgcaaaatcatgacaaggttttatacgaagctttagatggtaacactgtttatgatgttgtgactgatgggagtgacgaataagcatgaaacggctgtttcttttaattattgtgctttttagtttttcgattgttgatggtaactgtaattctccgtgtgtatctgcaaattcaattattaatcaaaataaaacagtaactacaacaaaagctaatcatcaagctaagagaacaaataaaaatacttcaatcaatataacgtctataatagcagttggctcgataatcatatcactactatattatggctatattattatgaatttaaattatttagaaaaaagattattgagtataaaaaatcaattctatattatagtttcaattatagcaattacaattttagcctatattcttactattttttcaattgtagttgatgcggaaatacgacgaccaataattatcttactttctgtatattcaattgcattaataataattactattatcgcgcataaacaagccaaaagtgtaattgtaaagttcaaatataatgataaagagtttcaattcctacatagaatagatgatacaacaatcagtgctaaattattagattcgtcatcagataatacaaacgatgatatctatactttttctatgagtgatttaagtaaccaccgtatatatacaaaaaatacgaaaaatttgaaggaagtgtccccgttgaatttaaaaccggatgaatatataaaaaatagattggatgatcaaataaattggtacgataaaaaaagtgctactcaaaagaaatgctattactggtcaaaagtagttactctaatttgtacagcctccatccctgttatatcagtagcatttaggcaccaatcattcactgttatagttactgctttaatagctgcaattgctactgttacagaaggtattctgacattaactaaatggcatgaaaaatggattgcatatcgttcaaatgcagaagccttaaaacgtgaagaatattcttatctaacatcttcaggtgcttattctgaactaaacgatgatgaaaaatttcatactttagtggatcgaacagaatatattatctctaatgaaaacaccaattgggcctccttaggaaagaagaaaggaaaatctatttaatgaaacataaatgctttatctcatttaaaccagaagatattttgtataaagaaaccattcaaaatgacttagatgtcgatatgattgataaatctcttaatgaaccaattaattctgaaaatgaagaatacataatgcggaagatacgagaagattatttaaaagattcaacagtcactatatgtttaattggaaaacatagtgcggaaaataatctatacgaaaatcaacattatattaaacgagaaatacaggcaagcttatataatgatcccaatggtattctcggaatagttcttccagaaatgaccgataaaatttacaaaggcacttatacttgcgagacatgtggacaagaacataattatgttgctatcgatgataatacagttattaaagaatttagtacaaattactatattcctgatcatgaaggttgcgcttggggaattgatgacagatattgtattttagttaagtgggaagactttattaattcaccaaacttatatattgatgcagcctttgataaaagatcagctcctgtaagaaaaaagattactgtttttccgaaataatacgatatgttttttcaaatatttctttttttactggccactgctctccttcaacacccgtaacaatccaatctcctgcattagcatgcattactccttcaagcgttcgaatatctattggcttctttgtttgataggcttcaactggtatgttttttttaactactttatataatttcatattatatacttcctttgattcagcgaatttataattattatatcattaaattaatacttgatttctaagaatcgtccaaagcctgatgacgtaaaaagctgacaaatgaaaaaagcccatcccctactggcataggagatggaccagggttgaataagatttacaggtctcaattcaaccctttcattatacacaatttaataatggagggacaagtatggcttcaataataaaacgttatggaaaatggcaagctcgaatttcatggtatgacagtgaaggaaaacgacaaactaaaagtcaaggcggttttcctactaaagtattagctaaaaattgggcagttgaacaaaaagccaaactaaacaaaggaatcaacattaagaaaactatcaaatttattgattattacgatcaatggattgagacgtataagaaacctaaagtagctgaaattacttataagcgttatgaatttactcgaaaggcattaaatagcttctttgctgatactgaattcaaacatatcgatcgcaaaatgtatcaaagatttattaatgagtatggagctactcacgccccacatactgtcaaagaagtaaataacattgttcgcgcttgtgtccggtcagcgatgttagatgattatctgattaaggactttactcaaaacgttacactggtagctaatgaggataaagaagtaaaagttgattatttaaatgtagaagaaattaaaaaactgctagaaaaagctgaagctgagatcagtcagcaagatatttataccagtcgttatatgattatcacagccatttatactggaatgcgactatctgagattcaagcattaacatggaatgatattaattggctacaccaaaccattactgttagcaagtcctggaatatgtacactcattctttcaagccaactaaaaataaatcgtctaatcggactatcaaagtaaatcaaactcttctacaattgctttctcaattgaaggaaaagcatattagtaatatggtatttatgactcagtttggtactattcctactagcaacgcagtcaataaaatgcttcgacaattgttagatgaattaggtattcaacgcaaaaattttcacttccacagtttgcggcacagccacgttgccctacttcttgctaaaggtgtggatatatatccaatcagcaaacgtcttggtcatagtgacatccgtacaacaatgaatacttacgcttatttaatagatgaatacaaaggaaaaactgatgacaagattgtcaatgctttgaaccaactttagtttggtacactagtgtaccaaaggtgtaccgactttgtactttttaatatttttccatacttttctaaaatactaaaaaatcctacaatcattgatataacaacgattgtaggatttttatacttcatcatattttctcaaaaatgcgtcccccgagagtcgaactcggatcatgaggaccgaaatctcatgtgctatccattacactaaggacgccttatattcctattttagcgcatttattaaaaaaataaagagaatttgtcaattttatttaaaaatacaaatacatatgacgcttatttattcccccttctcctttaccagcatttcttaagttaatataatagatatgttacataaaacatgagggggaattttccatgaaaaagcaatctacaaccattgcttcaatcgttattctgatcataatcgctatctttgcactattaaatacggcaactgtagtagtcaatctttttggagcacaagtaaaaatgccactagtgctgctaatctttatctgtttacttattggggctattattatttacttgctatcattttctaatcacctcaaaactaataagcaattaaaagaattacaatcatcgcgtgttagtaaggacgaattaaaaaagtatcaaaaaaagattgaccaactgcaaaaagaaaatacacagttaaggcaacaacttaaaagtaaaactactgtagaaaagccacaagattcttctacaaattaatatttcagagaggaaatcaaatgggaaaataccgttttattgcgatcgatgttgatggcaccttactagatgataatgataaattcgacgttaaccgtttaaataaagatattgaactattacaacgacaaaactatcactttattattgcaagtgggaatagttacgatgcattgtcaacgatctttcaaccgtgcccacttgtaacagaatttgtagcagaaaatggcggacgactgataataaacggcaaatctgtatacggcaagactcattcaattgcgacgttgcaacaactttatgcttttattaagcatacgttccctagccctgacatcctatctttatctggcgaaacacaaacaatccttgccgagcagtatcgcgatgttccagtccctttttatccccaccacacatatttttctgaccttcaaaaaatcattgagccaatttataacttaaacattggttgggccaaacgcaaattatcccaaactattatccaaggatatgtaaatcaattaaatgagcagtttccaaacttaattcaagcgacttatagtggagcttatggcattgatatcctgccggcaggcgtaaataaagccttgggattaaaaagactagttgaaaattacttgaacggaactctagatcaagtagttgcttttggagatacttcaaacgatattgagatgttatcagaagttggttatggatatgcaatgaaaaatgctactgatgacctactaaaagttgctgataaagttacaagatacgataataatcatactggtctattatcagagattgaatatcaatttattaaccgttaaagatattatgtaaactagtattcaaaaaaagatgtgcgagttgaaatcgcacatctttttttcttaatatactccaccatcgtagaaattgtaagatggtttattaaaatcgtaattaggaagttccgacattttaatgaaattatctgcaattccccaactcattaaattaattggtttaccaaagtcttcatcaggaatcactaccataatatatttacctagtgcgcgtgccattcctaattcaacacccattcctacatcttcttcttcaggaatgtagactgctaaaagcatatcagaagttgaaacacctactcgatcaccattgtaagttgctgtactccattcgcgatcttgcaaaagctctggatgttcatcaacacgtaatcctttatattggtgttgtaatggcacataagaattctctacatctactgtagggttatccttaattgcattcattgcatcctcataagctttattttgcttgtcagtaaaccacccggcacagaaatatactgtcttacttttttgatttgtcattaagtgaactcccctttaatttttgtacatttaagattctatcatggaataataaacttaaccaattaggattttttaatcttttctgagagctgtgttaattaattgcttggctgcctttgaaactgaaataccttttttatctgcatactcttttaattgttggtatatagctaagtcatccggcccacgccatataattcctgttacttgaccatgttctttattcattttaattccttccccataaaatgttagcgatattgtttaaaatttttgtgcggcgatgtaattgaaaatgagtagtttttggatatactttttgatgatacctaatcgatggatgaactttaattaatgattttaacatttccgattggatatgaggaacagctccatcagttgttttactgccttcttcactacccattaaattataaatttcaactggataatttaattgccaatttttcatctctaaaaataattggtgaaaattcttgtctgtcgatttattaactaaatgatagcgatattttaactgatcgctaagactttcttcaactggtacccctaaaaagactactttatttaaccgcatatgatcttgaagatattttgaacccatataagcatgaatgaattctgtgcctccatatgagtgggcaacaacattaattttctgcatatggtagtgtttctgcaaatagttcaaaacagtcgtcagttgcttgatttgtggatggtaagtaccattatagttccaagcaaataaaacttgaattaaggcattcttttgcccatgaaagtctccttcagtccagatacgtctgttaggggcaacccagatcattaaaactttttgtgcaatgtttttctgctgatagtacttaatcatcttattataagtaaccgtacttccgccccaaccaggaataagtaacgtaggaacagaagaatactctattttatcttggtaattttgtggtgataagggttgtccaggtgttcctcgtagtaagaaaccctgaataccaaaagcaagaagaattaggctaccaatactaattccggcaatttttaaagattttttcatcaaatcatcttcttatcatttcattttgtattttactcttattatacgcttgaaaattataaagaggatggtcttttaagcttttggatatggtattaaagttaatttgccattaatatattcgccaagatagatatcatcaacactgccatatcctgctttatggatttgttcaaatacccactgttcatcatgatggatcaattccattacgtcaatattgatctgtccatcattaattagtgggaagcgaacatttgcttcatcattttcgatgattacaagttgaccattttgttctaaaattccactcttgaccttagcaacttcataaattccgtgaccacgaagacggaacataaggtcattagcactgattcctgcacgcatacaattctctactaataattttccgttctgaattaatatttgcgggcgcccatcgataattcttcttacccaaatattatgatctttagcaaatttcacaataaatacaattaatgtccaaatcaaaaggaccattataaactcaagaacagaaatatcactattgtagataattccgccaataataccacctaaaacataattttgaacttgatcaatggcggatgttggcgcaagattccctttccccaataaattaatctgcagaatcaaacatagcataccaaggacaaactttataatgattaacgaataagtatccattcttctctcctacttcattaaattaacctgatgattaacaacatgtgctcgtgtaagggtataattatctctcgtttgacttaaattgacacggtaatcccgatcctcaattcgaacaagaattccatccgttaaagttgtggaattaacaactactttttgtggagaaacattatgatcccgagcaactgccttaataaagggaatcatctgagttgtttgggattgctgtgtggtacttttttccatatcggtaacttgaaaaccaataaaaagtaacaatagcaaaaagaaaattattcctaaatcacgataacgggtaataaggcgatgccgtaaatataaaaatgccattactgcaatcagaaggataaagatgataatagcaatataattgaatagttgattcatatgttggtggtttgataaatagctaattgtataaaatgtcaatttatttctctccttaacttaaatgtaataaaaacttaagcagctccccacccttttttcatacgctcatgatagaataataataacgatagtatgaaagaaaggaggaacttttaatgatcttaaaattagtattaaaacttggatggatcttgttagggagcatttcattcgttggtgggataattgggatgctcctccctgtaattccgcaggttccattcttcctcctcacaatatggtgtatcactaaaatttcaccacgttttcataactggctccttcgtaatccactctacataaaatatgcaaaacccttggtaaatcggcttgaaaatctgaaacattatccgaaacaaaaggcacaaaaaattaatagtaaataaaaaggtcttgaatgctatttgcgtcccagacctttttatattagccaaataatcgtgcccagaatcccttcttttgttctttaacaggcgattccgtaactttttcagctgtattcgtagttaacgtttcttcattatttgcttcgttttccgcagtatcttcagcatatgggttgcgttcaccaatccatttaaagaattcatcagctttaatttccacaaatttgccacgcttgccattgataccatccacacagagttcaattggcagtgcattccggtacttttcaatactatcggcagtaaaaccattgaaagtattaagcttcgagatatcaaataacaagctatgatcttgttgccggtatttaaagtcttcttcctgtgttaggtaaagtttagcccaccggttacgcgaactttccttaaagtcatcacagatttcatccgcaaagtaaggaggtacttccatatccgccatttgatagtaatcgcggaaaatcttacgggtatttgctaagaagtcaagcttaccagtcttttcatcgaatgcgcgccatggcgtttcatcgtcctctagtaagcttgccatccgcattacaaagtccttaaacagcgtattatttaaggtttgtcgtacattatagatatatttattggcttcacctttttgctggtcatcgataaccttatcaatttggagataataagttcgccgtgcagtttcacgtagcatagtaaaaccagaatcatagttagttgttccgattaatggcgcaattgcatgtggattgttgaccaattcattcatcgtatcaacaactaagtgccgactatattgatcttgttggaaaaagtatggttcaatctcatccattaaaacggggtatgaacttccaagcttcatgtagtgctcaattgcatcaacagtttttgcttttttctgcggtgtatctgtaggatagatagtcccaaaatcaattaatgaccgatcagtgttccatgtcaattgattaataatccgtaatagggttgactttccagaaccagcagttgctcctagaatcaagaagttaggaatatcattcccatcttcaggattcaaactagctttcgcacgaatttcccataaaaatggtgccgtaaaactatataaaatagcttcatagaatcgcttaccataatcatcattgtagtcaacaacgtattgctgatacccttttaatactgcatcaatactctttaagccatcacgaatttgactaatagtcgcaatctttccaaattgaattgggtgcgtgcctgtatcattcggtacgtacaggccactattattgttaaccagatttctttccatcggacgatcatataagaacgttgtatacttcttctctgctgaccgttgttgtggtgtcataccgctaatcaatgcatcctgaacttgtttaaaaatcttttcgcgcgatttcaattttggcttagctgctcgtggcgatacagctgttttttgcaaagtgtaaattgtatcgtgttgttgaatttgtcgttctgcttcttctttatcttgagagcggttagtcgtaatatctcgcatcgacttagtaatcattgcgggaattttattttcatcaatttgtttttgaacgtcatgactaatcaagtcggtcatatctgccgctgcgatttgatcggtaacttcattatcaagaattacaaccgcattcttagttcctttagtatctttcaagctctcatcaatttgattttgtgctgcatttaaaagattttcagtaaaaaatggtcgtaatactggcttgatgtcattcttatagtggttatcaagattttgaaatagccgaatgtcatcatcaaagactaatatttcttcatattggttacgctctttatcaaatgaagcactgtccaagttaagacttcccaaaatcacacgagtatcatgagtctcggaattacttaggaggtaaaaacgtgaatggatagcctgagttggtgcaattgcaacttgaaaaagattgttcaacacatttgcttgattgtcactagttaatgcttcaaagactttagcaggctttttattagcagcagatagcaatgcattggttaaagctaccttagtgatcacttcatcaccagttttagcttcataattttcagggctgctcagtgcaacttcgactttaatgaatcgacttagatactgattaataaagtcggcagtcacgttaccagtaactgctgttaaacgattgaacttattagcatcaaaaagctggctaatctttaatggtggagtatcctgaccattaaaaacaatatgaatcttttttagatctaaatctgtcattggcgtagtccttttctaaacaatattaactctttttattttcgtttatttaaaccaattttgcaagtgaccatcgaaatattttgtttctacgctagttttatatgcagatgataaagaacccccaatactttaatcaaatgaagtattgagggattattctaattacatagttttttaattcgtgttcacttgcgttactgcccctgttgcataatttatactaatattgttttgcacattgggcacgaatacattgtattgcaaactgccatcctttgacttggcctcaatatgggcacccgaaggcactaaattattaccatcatatacgtcagttacccgataacgaacttgtttattttgatccagagcttttcgcactaagccttcatagtagttctgcccggttgatgtactgcttcgagcttcgttggcccaagcagtttgagttgcaatattagcgggatttgactctgaagcatcaaaaccacggataccacctactaatgcatatcctagtaagtgtccgcgatcataagcatgtgagataccaccttttaagttatgggcttgtaaaaatccagctggcttccaattagtggctccattcccagtttcattccgattacggtattggcgtgttgtacgattgagccaggcgtctccctgccatgctcgtccacgcgaatcacgtcgattaacagcgtatggcgcattattaatatttgcgtttagtgccgtctgattgttatttaaaataaacgctccgtaaccattccattttatgtcagatgttcctaactgctgacggacaccattagaaagaacacccgtagcctgctcttgggttggcggcgtaaaagaagatgatcgattattattgctggaatggcgccaagatgctacccgttggattccctgtggtaaggtacttcccttgtcagatggctgggaaaaactaccaatgccgagaactgctactaaagctaaaagtaaatactgagtctttttattgaatcgaaatcgcatgtttctaaaatacctttcctcttaaacgtatgttcgtaaaagtattttatcattttaattgataaaagaaaatactcccaaaacaatctgtttcgagagtacttattctttatgctaatttatcttggcgctgagttcttaacttgtagataatgctcataataactaagaagactgccccaacactgactgaaatccgtgtatctgggttaaagaacataaatagtaagataacacttagcgcaatcaagctaaagtagttatatgctggataaaatggcatcttgaatgggtgatcctttaattcagccggattattacgccggaagtttaattctgaaatcaaaataataaaccatggtaccattccgggaaggacacttgaactatatacaatcacgaagatattagcagaggctgcattaaacattgatagaagcatgttaacaataaagccaaggaaaatccagaatgaaattgttaagatcgcaacatttggtacaacccgctttgacaatttactaaagaccttaggaacctcaccaccaactgaaagcttgaaaagcatccgactagcactatagattcctgagttggcaccggacaatgcagcagtcaaaacaacaaagttaatgattccagctgctccagtaataccaactttagtaaatgtctcaacgaatggtgatccaactgcttttaattcgtcccatggataaatggaaacgataacgaaaattgccccaatatagaaaattaaaatccgccaaataacagatttaactgacttaacaattgcatggcgtggtgaggccgcttcaccagcagtaataccaagtaattcaattccttgataggatccagcaatcacagatagtgagaacatgaatcccatgaatccaccagtaaagaatccaccatgtgaccataaattggaaattccaaccggatgccaattgttacccaacccaaggacaattactaacaatccaagaatgatcataacaataattgtaacaactttaatcatcgcaaaccagaattccaaccggccatatgccttagcagatgcaaggttcgcaagagttaagataatgatcattactaacccagaaatccagtctggcaagttaggccaccaataattaaggtattgactcatggcgataatatccgagataccaacaatgataaactgaaagacattactccactttgtcaggtatccagctaagggatgaatatatttagacccatagtccgcaaaggaaccagttcctggactgatatagatcatttcccctaacgcacgcataacaccatacaggactaaacctacaaaggcatatgctaataggacagaaggaccagtccatttaatagttgatgtggctcccatgaaaagaccactaccaattgtcccaccaattgcaatcatttccatttgtccgggagtcattgtccgatttaatttaacttcatttttctgattatccatcattctaacctcactttaaataaaaaagctacccaaaatgtccctagccaacccttgtcaatttttgataagtggttgagacatcttgaatagctattgctaacagatttaagagatattaaaactactcaaccacggtaattgttgttgtggttgaggtggaggttaggtgatgaataatcgatttattgtaaatttgcattttagtttcctccatttcgtttttcaataacattagaatactattagaaaattaaaaatgcaagtccttttatcaagtttttttgttttatttctttttgtgcgctctatttagcgaaaaaagactcatccccgcgaccgttaccgttattcccaagccaagaaaagtcgttaaattatcagtctcatttcctgtctgtggaagtatttgctggtcagaattatcgtttttacgtgaatcccgatgtgaacgatttagtcgattattaatacctgctatccgttggtgcacattttgctgctttcttgtattatttacctcctcataattttccgtgacctgattatcatcccccagaccttctttcatggggtaattgtcctgtgaatcttgcttttcctcttttttattctcctttgcttgcccctccttttgcttttctgctaacgtattctctttgctgtctttttttggcccttcatctttattgaggggctgataataaacatttactgcgctttttaattgtgataaatcctctatttctgtaacagttggaatcttatccattgatggtctaaaaccggcttggtcagggacattaacttcttcaaaaggttcaataatccaaattgcctttttggttggatcattcggtacttcacggtgagcataagacacttgttccacttttttaacttcatttaagagatgaaaataaattacacgtttgatttggacacattccttctggttatttgcgttagatacgggctgcgtaattagctcttgagttgtagctaaaactggtggagtatttaacgacagcgaaaggatcgttgacgctgtcgttaagcctactaagcaagtgtttcgcaatacacgaaggtggtttaaatggttcatattatctcgctcctcttttatatactctttaatatatatacgtaaagagaagcaattcgcattttttaaatcgaaaaaagctatcacctacaagtaatccttacctgcgatgacagctctgttaacttatagtgaatggataacctgctcaatatcatccacaatttgtttaggggttaagtggtaccattcatatagtacttcggtaggaacattatccgcaaattcccgtggtgctccaaagttcaaaactttcattccctttggtccatagtaacgagcaattgtttccccgaagcccccactaaggaccccatcctctagcgtaacaactacatcatgattttctgctaggtggtgaaggacatctgaatcgattccagttacagactttggattgatcaatgtagcatcaatgttaagcttgtcttgaagttccttccttaccctttcaccaagttcccagaagtcaccaacagccataattgcaacctcacttccgcgatgagcaatatcgtacttaatcgtactgtagtcatcttgtgttggcgtcccgtgaagaagaggcttttctggttgacgaattactactggttcatcagtttgattgattgcccaccgtaacatcgaaatcatttcttcgacgtttgttggtgctaaatattcaatgtttggcaaatcactaatcattgaaatatcaaatgttccttgatgagtagcagagctttctgaaattgacccgcctcgcacaatcattacaaccggagcatcatttaatgccatatcatgaattaattgatcatatgctcgttgcaggaaagtactattttgaaatacgacagggcgtgcacctgcttgcgccattgcaacagcagtcgtaattgaatcctgttcagcaatcccaacatcataataacggtccgggtgcttagccttaaacttgccaagatcaaacgcaccaggaattccagcattaatagcaacaactggcttatccgctgcaatttgcttatccaattcagcaaggacagcatcgctatatgattctccacttactttaaccttatcttcaccagtctttaagtcaaatggagtgcgccaatgatacttcatcttttcttcaacagcaggctcataccccttcccttttaaggtgttaacatgaaggacgattggatgatcaatatccttgatttccttaaaggtgtcgatcatcgtctgcaaatcattgccatctgcaacgtacttgtaatcgagccccataaacttaaaaatattattgggagattcaccattggtatcccgtagttcttttagtcccttgtatagaccaccttgattttcgtcaattgacatttgattatcattaacgagaataatcaagttagaattaagcttagcagcattgtttaatccttcaaaagctaatccgccacttaaggatccatccccaattactgccataacgttattatgtgattgcggcttcattaaatcacgcgcttgagccatccccactgcaagtgagattgatgttgaagtatggccgatttcaaaaaagtcatgagcgctttcttctggtgacgtaaatccggtaatatcttcataatgatccggatcaagaaaacctaactttcgacctgtcagcattttatgagcatagctctggtgtgaaacatcccaaataactttatcatggggcgaatcaaagacatagtgaaaagcaattgttagctccattacgccaagattagggcccacgtgtccaccaatttttgcgtcacgttcaagaacaagttgacgcatttctgttgctaattgttttaattcgtcaagtgacatgtccttaatatcgcttggttcattaacttcatttaagaggtaatcaggatgcagattcatctattccactccttcttgattttacatttaataattagtaatacttaatgctcttattattctaacactttctaaagcattgagtaaattactctcaagttcaaattgacgaaattcatgcatttcgataccattaaatagagtaattcgttaaaagggaaataattatgaaaaatatagacaacgctgcaactaacaaaatttcaccatttaaaaaattaacgacagagcaagaacaactcgtcaatgatattatttcatttactaaacaccatctaacacaaaatcatcctgcaatatatacagtctacggagatgctgggactggaaaaagcgtaatcttatcacaattattcgttcacattcaaaaagaagcgcggacacaacaaaattccgttctttatcatactaataattattttcttgttaaccatccagaaattctgaaagtctataaagagattgctgggccgataaaagagttatataaaaaggacttcgctcggccaacttcattaattaatcaattggataagcaaaaccaaaccattgatgttgctgttattgatgaagctcatcttttattatccaaacccgatcattataataatttttaccatgataatcagcttgtcgagattattaaacgtgctaaagttgttataattgtctttgatcaataccaagtcttacggatgaaaagtctctggacccctgaacgacttcaggcaattacaaaccaatatccccataaagattaccatttgacccacatgtttcgcatgaatgcgagcgatgaattagttaagtggtttaatgaatttactaactataaattaaccgctttaccagcatccgcccgtgatcattatgattttcgcatttacagtgatgctgaggaaatgaggaaagcaattgttcaacgtaataaagaagtaggactttcccgcattctttcaacatctggatatccatcaacactcgatggtggtaaacattacattgaggaaggcagatttaaaatgccctgggatcaatataactatacagtcaccccctgggcagaattgcctcaaaccattggtgaagttggctcaatctacacctgccaagggtttgacttaaattacaccggcattattatcggtccgccaattagccaaacacctcaaacaaaccaacttcaagtaaatttagatcgttatacagatgttgaagcattcaaaaaacgtgacgacctaactgatccagctgaaattaagagtttagaaaaaagaatgattatgaattctttgaacgttttatttaaacgtggtgtatatggaacttatctttacgctcatgatccgcttttacgacattctcttacctccctttttgagaaggctgggtttacgctaccaaaggaggaacaataatcatgaaagagcgtaaattaagtaaaacatggctgatcgttggcgcaattatcctcgccgtcatcgttctctacttcatttatcgaacatataagccagaaattgacctactactagactttaatgcccataataaggctaagcttctccatatgattagaagtcatggttttacagatatctttcttcttgtagctttaatcggtatcctaaatgcgattccgggaatgtcgaattccgttgtttgtatctttgctgggttatgttatggaccaattgttggttttctgattaattgggttggaaacattttaggaaactctactgtaatgagtataattcgtaaaattaacctctccaaacgggtaaagaaaagtaagatccttcattacctcttgcagcaaaagcatccgttaattgcacttacaatcggctttatgattccggttatccctagtgtacttgtaaactacgctggtgcccgtttaaatgtgagttggaaacgctacttggcgatggtaaccgtaggaatggcaccgacctcctttctctatgcctttggtggggatgctattttcaaaggcaacattagacgactgatcggtgtcgcaatcgctattttaattctaattggctgttatttactcgttcgcaaaatctggcaaaaccatgaagaaaaagcagcaacaaaataattaacttgattaaaaacaaggctccaaacgtccggcaaatccgaatgtttggagcctttatctttaattaaatcttgaccaatattctgccaaatacttgctggttaaactttctggtttttgaataagggctaacggattaccctgagccacaatttccccaccattgctgccaccgcgcggacccatatcaagcatataatctgcgttaataatcaaatttaagtcatgagtaatagtaatgattgtcgctccccgatcaagtaattgctgcattaccgctaaaagggttttaacatcaaggggatgcaagccaatagtcggttcatcaaatacaaataacgtttcactttgattatgattaaggtgtttaacaagttttaagcgttgcgcctcaccgccagaaagactaggcgtactttcgcctaagtgcaggtatcctaggcctacttcatctaataattgaagttcacgagcaattttcggaacttccttaaatacactcatcgctgcccgaacatctaattttaagagatcaacaattgaatatccctgccacttaactttttgaacttcttcattgtatcgacttcccccacatgttggacaagtctgttgcatatctggcaagaattgaatatcaagagttacgaccccgcgcccccacacgttggacatgctccctgcttattattataagaaaagtaagaaggtgtatagtgtttctctttggctaagggctgggctgcaaataacttccgcagattatccataatactggtataagttgcgactgttgaacggttagttttaccgattggcgctgcatcaacacttactacttcttttaacggacttgacaattttcgaacttgcgaaggtaatttagccccacttgcttgagcatggatagcaggaactaaactatcaaggatcagacttgttttaccagcacccgaaaaaccagtgatagcagtcagccgattaaccggaatctctccatagacgtctttaagattgtaataatcttttacttcaaaggtaatctcttgactagctggttcgtttgctatggggcgactttttaatactgctgtcccatttaaataaggaccaattttagactgagggttgtcagcgatttgcgatggtgttccctccgtaagaatttctccacctttttctccagaacccgggccgatttcaataatccaatctgcttctttgataatatcaacattgtgatcaacaactactaatgaattaccttgggccactaattccttaaatacatttaagaggcctgtaatattatcaggatgtaagccgatggaaggttcatccagaatatataagacaccagttgtttgggttcgaagagttcttgcaagctgaatacgttgtaattcacctgtcgataacgtatttccgtttcgcgataaagttaaataatcaaggcctaattccagtaatggtcgtaaattatcatcaaactctttaaataatgaggtcgccatctttttcatatctgaaggaagagcagctaaaacatcttgcttccacttgctcaactctccaagcgtaaggtcactaacttgcgcaatatttaaaccaccagctaattgttttaataattctggctttaaccgtgttccatggcaaactgggcacgttgaataatggaaaaattcgctaattcgtttttgtgctcgttcgcttttactgcttttggcagatgctaataccgcttcatgagcgttctcatataaagcattaaagtcatgaaaaacacggcctgttccagagcggaagtccatcttaaacttcttttgtggaccatttaaaacaaaatctttttctttaggggttaaatctttatatggaacatggattcgaacaccggcctgttcagcaacactcggcataaagtttcgtccaggcaaatgccatgaagcaactgccccatcagctaaactaagattttcatccccaataagtttactttcatccagttcacgaacttttcctgttccatgacatcgtaagcaggctccgtcagaattgaatgcaaagtcttctgctccataggcataaaactttgtgccgcaagtaggacaggttaattgtcccatttcatcgccgctcttactcattacctctgcgatttcaaggcttggttttaaacgatgcccatttggacagaccggttcgccaagccgcgaaaagatcagcctaattacgttcaacatctcactcattgttccaacggttgctcgttcagatggaattgcgggacgttgcttcaatgctagtgctgaaggaatatgtttaacacttgtaacatcggcttgagcacctaactttatccgccgtcttgtgtaagtagaaagcgcttctaagtagcgtcgagatccctcttcatataaaatccccatcgctaatgagcttttcccagaaccagataatcccgaaattgcgacaaatttatgtaggggatattgatatcaatgttcttaaggttgtggactcttccaccttttacttcaatttgcgttggtagtctggtttctgtcactattttttactcctttcatatcatcattccacagatggtggcaataactccaccaagataacttaagccaaaataaacagcgaacattccccatcgcctttcatccatcattgaaattagttcaacgttaaaagtcgaaaaagtagtgtaacctcctaataggccaatcccaaataatagcatgagcgatgaattactagcaaaatttttggtaagaatgcctaataaaaaactaccggtgatattaataaacagagttgctaggggccaatcaattcttaactttttccaccagcttgtgatgatataacggatcacagccccaattgctgctccaagccctacattaatcatcttgccgcgaacctccgtattttcgtgccaacataaaaccgagcagtgccaaagccaagccgccaagagagctcacaagaaaataaccgatgctagcaattataccttggttttcaagcttaacaatagttgtggctaaacttgaaaatgtcgtaaaagcgccaataaaaccagttcctatcccggcatttagccatgctgctaatagtccccgctcaataaaataataagttataaaagctaacaaaaatgaaccaataaggttggcatataaaatcccatcgccgcctaataggacactaagttcataacgggtaattccgccgaggaagccgccaatcgagacactcattattgtttttatattcataaaaaatctccttagatctgcaatcatttcattatacaacttttgctatttcaatttagaaacttgtataatgatattgatttaaaaatttaagggagacttagataatgaaaatgcgacgaattgatcacgttgttttaactgtaactgatttagagcaatcaatgcgcttttatcacgaagtatttgatatgccggtgattaaagaacaaagtaatgacgacttaattacaatgcggtgtgggcatcagttaatccgtttacaaaaaattgaccgaccaactactttaaaggcagctgatccgacaattggttctgctgacttatgtttagttgccggagatagtattgacgatattgttcaccatcttaatagctattatattgatataattgctggaccaattgtaaaacaaggggcggaaggcgaaatgacctcgctttacgtttatgatccagataataatctgattgaaattgcagtatataagaataaataaagtaaatatgagcgagagaaggttgttttccacttctgtctcgctcatatttcattttcaaaataaattcaactaaaagtaaaaagagcgtgctaccgcaaaatacccaccaatggtcacggataatcccgagatagtcacgaataaaagttaatggacagtatcgccaaggagtcttgctactaatgaatgaccagtttaaccccatcctccttgcataagctctcgcacgaagaacatgaaaatcactagttactactacaaccgtctcttgcggcttaatgagttgactagcgaaggctaaattttgccatgtattaagtgccttgttttcgcgaattatttttcttgctgggattccgtgagcaattaagtaagcagccatgacttctgcttcagattcttttgctttctgtactattccccagaaacaataatttttgcagattgatgagttttccaacaattaatggataatctccgtaacaactaaaagaataataattatgattgcaataatatagccagatactcctaaacgatagatatgtgaatcagctggtgttccctggactaataatgatgatcctaagatgactgctgctaaaataattgcaatcatgaaacggttcattaaccgttctatctgctttagcactcgttgctcatttttatactgtagatcaactttggcatccccacttacaaatgtatcgatcaattcattaattctttctggcatcttccccattgctttgctagcaaggaaaaaattgactaggttattatcaagggcagaacgccaattaaagtttcgttttaaataacgccggccaaacgattgggcaacctcaagcattgatatttcaggatcaagtttagcaaccgagttttcaagagttccaaatgccttaattagcatcgttacctctcccctcatttgaaggtggtttttcttacatagctggacaatttggtatagcattttcacgaaatcaatattgccaaggccggttgaaaaatagggttgcataaaggcgccaagttctttataaaatgcattttcgtcaacttccccggttcgattacaaacatttaaaactgcttttccaatttttcgcgtatcctttgtgttgatagtaatcacaatattcgcaatactatttgccatcgctggacttaaccttcccatcattccaaaatcaaggtagatgatccggtaatttggtaatgcctcctgttgatcataactaatggttgtattataaatggtcttttcatggtgtttggtcgttgcgtattgctttgctgattcatccggacgtaattcgtgaattaatatatttcctggatgcggatccgcatgaaagtaatgatcaacaaaaacttgttttaaaaagttattaacgagcgtagtagcaatttcatgattaacggtcgttgcctcttgatcattatcattcggctgcttaaaccgatatcgaatgctttccccttccatcgcttcattaacaagaatcttaggagcacaatacttcatatatactttaggaactaagataggtccgtcaccattatttaatgtataaaattcttccccattttttgcttcttcaagagtattgacctcacttaataatgaagtactgagttcatcaattactttatccaaatcaactactgcaatgtcttggggaacatacttaaataagaccactgctttccgtaacaaggctaaatcagtattaacaagcttaccgacttctggatgttgaactttgacaacaaccggtgtcccatccttaagcgttgcatggtgaacttgcccaatcgacgcagaagcaaaaggtttttccgcaaagctagcaaattcgtcattaattttcttcccagtttcttcttcaaaagtttgctctacggtcgcaaagctatcagctttaacctgatcttgcaagtggcgaagttctttaatatatgctggggagacaaggtctggacgggttgataatatttgaccaagtttaataaaggtcggtcccagttcttgcagtgcctgacaaatagcttgtggattagtttgatggtaaaaattgctaacaaaatgatattttcgcatcacttgcataatcttacgcaagcgtgctgacttcttgatttcttcttcattagtcgtcatgtgtcttctcctacttattttcctttattttagcattttcacttataaaaaaataattaaactcccctttcactacattttactgatacaatagtagtcgataaattttttaagaaagtttaggtgaaatttttaaacgatgaatggtttatgggattcatattggtttaaattaattatcattattttaattctgctgttagctgctttatttacactgctggagtattcagttgttaaagtgcggcctagtgagttaaaggagctccggcaaacgcgaaaagtcaaacgtgcggaacacatggtagcaaatcttaatgagtacctatcaacagctcaagtcggtgttacgatgacttctttagttttaggttggttaggtgatgaatttatcacagatctattgctaaagattaatattattccgcacgatgttcttcaagcgattgcaccagttatcggtgttttaatttttacattcttccacgcggtatttactgacttagttccgaaaaatatggcgattgatcgaccggtaccaattctcttatcaattgttcacccggtacaattcttccatactgttttttatcccttcgtttggttatttgcggtagtcgctgcggcaattacgaaaatgttaggatacaatgttcagccagaagaagacacatattcacaaaatgaaattatgaccttatcccaacaatcggaaaaagctggggaaatggataaagaagatgttatcttcatgcaacgggcttttgaaatgaatgataaagttgctgaggatattatgattgatcggacacagttagcggttattgatattacggcttcaattgaagatgcagctaaactttatttcgaaaaaaaattcacgcgttttccagttgttgctaataatgacaaagaccacattcttggttatatttttgcatatgatattatgcggcaaaaccaaatcaatccgcaacaatcagttcgcacaatcatgcgccgaattccaatcgtttacgaaaatgaacaacttaccaatgtccttgctgagatgatgaaaaaacaagtgccaattgtcgttgtccaagacgaatacggtggtacttctgggatcattactgataaggatatttatgaagaattattcggaacagttggcgaagaaattgatcatgctacctctgatatgattgaaaagaaggatcctgatagcaagggtaatcctaccttcgaagtttcaggtaagatgccactagatgattttgaacgttactttgatacaaacatcgagcaatttgacaactctgaagtaacaaccttaactgggtttttccttgaacggcagtatgacttaaaagttggccaaccaattagagtcgataatttctcattcacacctcttgatttgaagaatgcctatgttaataaattcaaggtagtttacattaagcctagaaagaagaagccattagctgatgaggatcaaagcaaggaaaaatagatattaaaaaggctcgccgcaatttaggaaagatttcctagttgcagggagccttttcattagcagttcatctgcatatcaggaatgcagttacatttgacgtggtccggcgaattagttgctttgcttgccaataattcttgtaacttagcaatatcatccttgctaagggttacattattgatcacatgttcaagggtgcttccaacgtgtcgttcacaaatattattaaataggttgtccgccgcttggtccattgtttgctgttcgggaactaagggctcatagataaatccacgtccttgacgagtggcagataaggcttttttatcaaccaagcgtcgaagtaaagtcttaatcgttgccggtttccagtcaacttttttctgtaaaatttcaataatttggctactggtcgtttgccttagactccaaactacccgcataatttgccattcagcgggagttatttctaaattaatattcatctaattcctcctgcgtttacacatgtaaattcttcgtaactatattttatcattaatttacttacttgcaaattcctaatgtgtattgacattaataatctggctagtaaactcaatactgtttgactaattttaaggagcgctatatctactaatgaaaaatcaacgcatcagccatgcattagtaatcatggtatttggtacatttttcggtcttctctgttcaaccttaatgaacattgctctcccaacctttatgaatgtctttcatatcagtgaggctcaggttcaatgggtaacaaacgggtatatgcttgtcaatgccctaatgattcccgttagttcattccttataaaaagattccctttcaaaaatctttttattattttctctggaatttttcttctaggaactattatcggagcgattgcgtggagcttcaatctagttgtaattgctcggatgattcaagctctgggtgcaggaatgatgatgccactagtaaatgtcttggcaattcgttacgcaaaaccgggtaaaaaagggcaaattatgggaattattggtcttgcctttaattgtgcccccatcttaggccctgctatttctggctttctattacactttttctcttggcgataccttttcctattaattattccctttgcagtaattacattactactttcattcttcctgcttcctaaaatcccacataatgaacatccccgctttaatacattggcccttattttaatcacaggcggattatggtcattattaatgggcttatcaaatgtttcgaacagtcacttgctttcatttaatgtcgcagggtatgtccttatcggcttagtctttctcttccttttctttcttaaccaacgtcacagtaagcgtcagttaatcaactttaggatcttctcccacaaacaatttgtttttgccactgttattaatatgctaattacatcaacaatgtacggtaatgcaattttgattcccctgctcgtacagattgtcttgggcaaaagtacggttatttcagccatcgctgtccttccggggcaatcttaacgggtttactatcgacaacgagtggccgcttttatgacatttatccaattaagattctcgttgggactggtctcataatcgatatcatcggaacaatcggtcaagccgcaatcggtgcgcgtagttctgtcctcatgatcactcttttccaaacaattcgccagtttggattagtgacaatgttaatacctctgcaaacacaagcattatcattgctacctaatgagatcgttcctgatgcagttgctacctttaatacgttacgacaaattgcggctgcctttggaactgccctcatcgtttcaattgttggtattgttaatcacttagttcacaacccgtcctcacacctcggtattcaagccggcttccttctatgcttatgcctgctattaacttcgctataccttagcactaagctataccataaaatttcttcgcaagcgcaattagaaaatgcgtaaaacaaaaaccaagtaagatcccttttgacctcgcttggttttttgctatttaaaaatgcaaattcaatagcgttacaatacaataggtcatcccactcgcgataactggaccggcagcaattcccttaaacgcaactactccaataatcgttccaagtactaaggcaaccgtgacttgaggaacagctgccaactggttgactccatacttcgataagatggcaactgcaatacccatgccgactgcaatccaaccagcaggggtcttaaaagccgcccataaatcatcaaaaccaatttgccccgtcgcaattggaatcaagatcgcaactgaaatcactgttacaccccaattaattcctttatgctgtatcaggggcaaccacttggcggtataagggatcagtttcaaaaccattactactactgtggcaataatcaatgacgagttatgaccaaagattgcaattaataatactaaagctaaaaaaagccagctttccatgtaatctcctcctcaaactttacctagtatatcaaagttgaggacgaggacaaaggaagctgactaattaactaatcagaaaggcggctgtgagtagcgtcatctacttcttcgcaccattcgctagttcccttcgtaatagcaatatgagagaaccaactatctttagtagctccatgccagtgctttacaccttcatgaattgctacaacatcaccgggttttaacaattgcgccggcttgccttcttcttgataccaaccctcaccagcagttactaataagatttggaaaccatcatggtgaatatgccagttgttacggcaaccgggctcaaaattaacgtttgaaacatttacatcaatgttatcatcaggagatactaacccattgagataacttgttccaataaagtattttgcaaatgcaacgttcttatcaccaaaaccaaaaaggtcattttttatttcgtattcattcttagccattattactaacatccaattaattgttggtttaataataaactctagcattaagaatgtaaaaatcttattataaatggtgagttattcaaaaaatgaattataattttcgcaaccatgaaaataatgacttttcattgaaagctggactaccatgagtaagaatatggtagccgggagtgacatttaacttaccagcatagttgatgaagtcctcttggtaatcaccagtgttactccaacctgtactaaacggcgcaatcttaccagtgaatttttgaatttgttgaagtaagtcaatgattggtgagacaactccgccattccagactggtccaccaactaaaatcaaatcgtaatacgataagtctggtaaggtggtcactagtttagggaaggcatgtgtcttaagctgttgctgataaattcttccagtttcttccatatccagtggaaaagtatcatcgggaactttaattctcacaatatcggcaccagttgcttcatgaatcttactagcgagtctagcagtgtctccgaattgcgaataatataaaattgccattatcaataactccttaatataaataaaaatgagggataccatatggatacacgtgtattaaaatactttttaactgttgcacaaactaataatatcactaaagctgcggaacaattacatattacccagcctaccctttcccggcaaatcatggacctagaaaccgaattagacataaagttgtttaaccgagaaaaccggcgccttcagctcacaaaagctggaatcttatttcaacagcgagcaacgaccatgctacaactcttggatcaaactgaaaacgaccttcatcaacaagaagaggcattaacaggagaaattaatctcggctcagcagtttcgagtgtctctccttatataacgaaaataatttttgaatttcaaaagctttacccgaacgtaatctttaatttatctgatggggatggcgatgtccttcggcgtcaactagatgaagggctcaatgaccttgtatgcctccttgaacccgttgaagctgctaaatataactttctcgaattaccggtccgtgaagaatggggagtaatgatgaaaaaatcggccccacttgccaagtattctactatcaccaaagaagatctttacaaaattcccttaattcttccccaatgtagtattgttcgcgatgaagttagtgatatcttaaaattagatcaaacgcgtttaaatatccgtgcgacaactagtttacctggaaataccgtttcacttttaagaaatagtaattactatggtctgacaattaagggcgtctataataattttcatgatcctgaccttgtttttgttccccttgtacctaacaaatcgacaggggatgtccttgcctggcgcaaaaataccatcttatctccagcaatcgaaaaatttcttcagtttgttaacgagcaaattcaaggatcctaaagtatttaatgttataactgatttagaaaggggaatttaattaaaatgaatcaaaatctacaaccaaagataaaattaaacaacggtcacctcatcccccaacttggcttaggagtctggaaagcctcacttgcggaaacacagcaaatggttaaagaggctgttatgaatgattacgtcttaatcgatactgctaaacaatatgggaatgaagcagccgtcggacaaggcattcaagatggtttcaaggctactggccgtgaacgtgatagcatctttcttaccactaaaattttcaatggtgatcaaggagattatgataaacttcggcaagcagtgaatgagcaattaaaaaagttacaaacaaactatgtcgaccttctccttcttcattggccagttaatgataaatacaatgaaagctggcgcgcgttagaagagatttacaaggacggtcaagcaaaatcaattggtgtttgcaattttaatgttgaacgaatgactgatttgctcgatcacgccaaaattaaaccagcaattaatcaaattgaattcaatcccctgattcaccagcctaagattgtaaagttttgtcgagaaaataatattcagcttgaagcctggtcgccactaggtaatggtcgtcttctttccaatgatgttattaagcaaatcgcagacgagcacaaaaagagtcctgcccaagtaattcttcgctgggaaattcagcaaggctttatagttcttaccaagactactcatcctcaacgtatgcaagaaaatgccgaaatttttgactttaccctatcaccggatgaaatgaagcaaatcgacaagttagatcaagaaaagcattctatctggtatgataagttcaagtggtcaggaaatccggacggtgtagatgactatattggtaagccgggcgcattttgatccaaccaatttcatatcttttaccataaagggcacctctaaacgagtgatgccttttttattagctaaaattttctagaaatgttcatattattatactataattaaaatcattaaaagaaagagaggattctttaatgaaagctgttgtatctgttctaggtgaagaccaagttggaattatcgctaaggtaagtgcccttcttgcccaaaaacaaattaatattctagatgtttcccaaacaattatggatggcaatttcgtaatgatgatgtctgtgatgatccctgaaaatcttgatagttatcaattaactaatgaacttacagaacttggtaaagagattggcgttgaaattaaccttagaaatgccaaaatttacgatgccatgcataatctttaagatatacaggaggaatatcacttaatgaattcacaacaaatttatgaaaccagccacatgatttctaatgaaaacctcgatgtgcggacaatcacgatgggaatttctttgcttgattgtatcgatagtgatagtacggttgcatgtcaaaagatctatgacaaaattacgacaaaagcaaagaaccttgttaaagtcggccaacaaattgaagccgaatatgggattccaattgctaacaagcgagtaactgttactcctatttccctcattgccgctgcttctcaagaccacgactatgttaaatatgctaaaaccttagacaaagctgccaaaacattagggattgattttatcggcgggtacagtgcgctggttcaaaaggggtaccaaactggtgaccgtacgttaatcgcttccctccctgaagcattggcggaaactgattttgtttgtgcatcagtaaatgttggctctactcgtagcgggatcaatatggatgccgttgcacaaatgggtgaagtagtcgtcgctggttcaaagcttgatatgatgacaaatgctaaactagttatcttttgtaatgctgttgaagataatcccttcatggcgggcggatttcatggtgttggtgaaccagatgtagtaataaatgttggtgtttcaggacctggagttatcaaaaccgccctagaaaaagttaagggcgaatcaatggatgtcgttgctgaaacgatcaagaaaactgcctttaaagtgacacgaatgggtcaattagtaggaactgttgcagctgaaagactgggcgttcaatttgggatcgtggacctttccctcgcaccaactgctgccgctggtgattccgttgccgaagttctagaagaaatcggcgttgctcaggttggaactcatggaaccaccgctgctctagctatgttaaacgatgccgtgaaaaaaggcggtattatggcctgcagtcatgttggtggtttatcaggcgcattcatccccgtctctgaagatgctggcatgattaaggcagttaacgctggaacgctaaatatctctaaattagaagcaatgactgcagtttgttccgttggtcttgatatgattgcaattccaggtgacacgccaaaagaaaccattagcgcaatgattgctgatgaagcggcgattggaatgattaataataaaaccactgctgtccgcgtgattcccgcacccggcaaaaaagttggtgatacggttgaattcggtggtctattaggatatgcccctgtaatggcagtcaataaagccgcaagtaccgcaatgattaaccgtggtggacttattcccgccccaattcatagtttcaaaaattaatttaaaaaatagcgagagattaggaatccctagtctcccgctattttagtgtttaattacctgttaataaggcgtaaacatatgaattttcttctggacggtaaaccccgtgaagttcaccaactttagtaaagccatttttgtcgatcaagtgttgcatgatcttgttgtcttcatgagtatcgatccgaatagtcttaatatccttccgattattcttaatgtaatcaattacactagtgaataatgctgaggcatatccttttccagcatgattggagtgaattgccacacggtgaataacaacataacgatcagtgtcaattaaccaatcaccgtcaagttcatcatatgagtgatctggtgcttcaacaattgataatgcaccaacagtttcatcatcttgtgattgtacaaggtatgcaaatcctttttcaatatcttctttgatatgttcttcgttcgggtaatctccttgccattgatcgatcccttgttcagctaattggtttcgaccatctcgcagaatttccataatttgatttaaatcatccattttggcttgtttgatttgcatcgtattaccttcccttctcattacattaattagatgtgttattcgtttagcaaccctaatactgtaacatattttacgttttaaatacaactgttaactattaaaagatgccccttcaatatgctatgatagcactaaaaagaaaaagaaggcttctatatgatcaaatttattaaatttactttaacaatatttactgcatttttcctaatattcatttatggactagcagcaaatccagttcatgcagatctctcaaataaatatattcattctactacccccaccctctttttccatggctacggaagcggtgcccatgcagaagaatatatggtaaatggttttgtgaaagcaagtgtgtcaaagacagttatcaccgcagatgttgctggcgatggaaccgttactcttaaaggagatattcctcataacgccgtcaatccgctcgtgatggtcaatttcaatgataaccatagcacaaattatgaattacaaggacaatgggttaagaacgttcttgaagaactgcaagctaaatatcattttaaaaaggtaaatattgaagcacactccatgggaaacatggcagttatgtattttctgcttgctaatgccggcaaccataatcttccacaaattcaaaaacaagttgcgatggctggagcctttgatggtgcaatcggttggaatgaacctgctaatctaatagtgaataaaaagacgggaaaaccttccgcaatgaatgattcctatcaaaaattacttcccttacgtcaccgctacccacggcaaattaaattattgaatatttacggtgacttaaaagatggcaacgatagccaagtttcaaacgcttcctgtctttctcttaaatatcttattaataaccgcgcacgttcataccgcgaagttaagattactgggctaaacgctaaacacgaattacttcatcataatccgcaagtcaataaaatcttaatcagtttcttctggggaaagtaataatgttgcactaataagtttattagtcatttgaaagtagtttttgtataaagcagtgtaacgaccactatttttagttggcagccatggcttgtctcgcccgcaataatggagaatcacggtattacgcattacccaatcggttgtccattcaccaaaggaaatcgtttcgtaaataccgcctttacgagtatcaaaattatatagttgatcagggaaagatttaatataacgtccatataaggcattcaagacgtcttgatcaggtaataaaagtgtatgggtacggatgtagttaaaaatatccgtatcctttacttttttacggatagtatcaaggttcatcaagagaacgccagaattataatacccgtcagcatcaaagttttgcagacgaatcttattaataacctctgtcgtattcgtcaggtttgtatggatggcagaagcatataggtatccctctaatgaagtctcatacagacttgaaagatcattaatacacaatacatcagcatccaagtataaaattttatgcaaatcttgaggtaaaagacagtgtgctagtaaacgataataaattgttgtcggatagcggtctgtaactggtgctttgctaaataattgatcattaactttgattggaaaatagttcattcctaattgcttacaaactctttccaagtcttcagttcgtttcaatttctccttttgtaagacatatacattaaattcttgtgcatgagtatttaacttgatcgataacaaaactgttgctaattgcgtgacaaatttgtcgttaattgaaaataataaattcattttattccacccctcacatcttattctacaaaacgttgacgtggattgcgattcagtatttaataattaaagaaccaatcaagaatagaggttttatgatgaaacaagcggaacaattaactgccattaaagagtacaccattcaaaaattaggtcaggacaagactggacatgggatggaccatattaaccgcgtagtaaaaatgagtaaacgattagcaattggtgaaaaagttgatccctttttgcccatcgtggcggcctaccttcacgatacaattgatgagaaattagttgacaacgttgaggcagctaaacaagaattagttgattacttaaggcaaaatgactttagtgatgaccaagtcaaaataattatggatgtcattaataatatttcttttgctcataccttagataaagaggaagtcaagctctccatcattggacaaatagtccgtgatgccgactggttagatgcaatcggcgcaattggcattacgcgggcaatttattatggaggtggccatcatgaaaaaatatacgatccggctattaagcctcgtcataatatgtcccgggaagaatatcgtaatttagcaaatgaaactatcattaatcactttgatgaaaaactcttacatctaaaagacatgatgaacactgaaactgccaagaaaattgcaaatcaccgtcaacaagtgatgctcgactttcttgatgaatttcatgcagaatgggatgcaaagatgtaaattatttagagaaataataaatgccttggaaaacttgaatgtttttccaaggcattttgcttacttatcatcttttttatttttagcacttcttaagtcgacaataatcgaaccgccctgcttatcgcctgcagagttacctgaatcattattatgattattatcaatatgcaatgcttttcgcgctacccaccgaaaaatcaatgagatcggtgctaccaggaagccatacaataatcctgtcagtaatgcattaggaataatcagttgaacaaatgttaatccacctgttggcgtccccgttaggactaatccaattagaccataaaagattgaaataaagaataattgaactagaccggtaaaaatagcaagccataataattgtgaatgattgagatcaatagataatggaacttgtctgcgtaaaatcaagccaaccacaatcaaaataacaataaaatcgactaatattacccagtcagcagttcctaagacaatcatgattatggcactaacaagcgtcacaataaatgcaatattaattcccaatgcaactgctattcccactgcaatcacgccagctaaaggcataaacgccttaccggtcggcaaaatggtttgaaagccagtaaatgatattaatatcatcaaaatacccgccgtaattgccaaaagggttttaattaaggtttgttttttcatgctaaaggcttctttgctgtatcttgcatccatgctaaggccagggctccttgtcctaagtgggaaccaattactggaccaaagtaactcaactcaaatgaaatatcaggatgatccgcttgaagtttatcaagccacttttggccttcttctggagcatttgcgtgaacaaccatcgctctaactggatagtcaagtttggcaatatcctcatcaaagatttgttcacagcgaagtttagcctttttcattgaccgcaccttttcaaacgcttcaatggcatgcgttggagtatgcatagtcaggagaggtttgatttttaaaattgagcctacaaatgcagaggcgtttgataaacgaccaccacgaacaaggttttgcaagtcatcaaccacaaatacattattaaaggtatcacgatattcctttacctttttaacaatgtcatctaaatcatcgccttcactagctaatttagctgcttctaaggctaagtaccccatcattttaactgttaggtgggaatcaattggtacgatcttgattgtatccttcatctgctcagcaagttgttcaacagtatccaaatatcctgtaatagcccgtgttaaatgaatgctaatcacagcatcatacccatcatcggctaatccttggtaaacttccatcaattgaccgattggcgtttgagaagtcgttggaaaagagcttgaatttgccatcttttcataaaaatcactggtggaaatatcgacaccttcacggtatgtttgaccatccaatgtcactgggattgggacaacatgaatattattagccgccgcctcttcaggagaaaggtaggcagtgctgtcagtaacaacagcaattttcatcttatcaactccatgttctaaatttgtataaggcagattgcaagaaataacttgaacaaagttagtgacgcagattacgcaaaaagatctcaattggtgtgcgccagtttaaacatttgagtggcctggagttcaaataccagttaatttgaattaactcatcatcagtgatttcctcaatcggttgacttttaaggataaagcgtcgtagtactcggttgcgattctcattactgccccgttcatgtggagaataagcatgcgcaaagtagaggggaatcctggcctgctcttcaattagcttgtagttagcgaattctttcccatggtcaacagtaagggtcttgagattatcttctaactggttagctaattctaaaatggccttggtcattgaggtactatctcgtccctgaagccgtttaacgatgataagacgactcttacgctcgacaaacgtagctattgcttgacctttacgctttccagataaaactgtatccgcttcaaagcgacctgaggtatgacggtcaataacttcagcaggacgatcttcaatggaacgtccatggctaaaagtcccacggggttctttggctcgtcggcggcgaattccatggtcaggtaaatcagccacgtcaatatccaatactccttgatcaatccagttgtagatggtcttgtaggcgattctaactacatgagccacttgttcaatcgaccatttttggatcttaatcttttcttcaattaatcgcttgaggttagtcgttaagatggttttacgcccacgatgactaagtttagcttcatgatcagcttgagctttaactgcgtgatattcaccagtcaaacgatgaacctcattaaagatcgtggttttaccgaagccaaggtaatcagcgatgtatttaagggagcggttttcataacgaagagtttcgatgacaacacggtcttcaaatgataaaatagtggtgcccataaaggtccttctttctaatggaatgttgtggtaacaccattaaagacctttatgggtttttatgtccactaatatgttcaacttaaattttacaatctaccataattaaaaataattgcgtttttacgcggatttcacccacataatacaaaaagcataccacattgacggccctaaaccaaccaaaaatatgtccactaaagcatcattacttttcattaatgatgtaaaactgtataattaatagtgctattttcgtttgtaattataatatttaggaggctacactaatgtcttttgatggcttgtttactcatgcaattgtccatgagctagatcaaaaattaactactggtcgggtagccaaagttagtcaaccttaccctgcagaattaatcattatgatccgtgctcaccggcacaactatccattactcatttctgctaatccaacatacccacgaatccaaattactgagatcccatacaaaaatccagcggttccaactaattttacaatgacgatgcggaaataccttgaaggtgcaatcgtcaataaaattgaacaagttgataatgatcggattatcaaaattacctttgacactcgtgatgaattaggagatagccaacaattagttcttgtgagtgagattatggcccggcatagtaatatttcactcgttaatctcaagacgggtaaaatcattgacaccattaagcatgttggctcagatcaaaatcgggttcgcctgttattacctggtgctacctttgtcatgccaccaaagcaagataaagttaacccttacttgccaaaccagatctactctgatcttgtaagacaaaccgatgacacagtagaattaagtcatcagttacagaagcattatcaaggatttggcaaagactccgcacgggaattagctgcagaattactgcaaagtgataatttaccagctacctatcagcactttcttaagcactttgaaaatccagagccagtattaatcacccactctaatggaaagtctcaatttgctgtgttccctccattaaatattgatggtgagttgcaacatttcgactccctctctgcccttctcgatgccttttatgctaataaagcagagcaagatcgttccaaagaattagctgggcaagtgttaaaggtattgaagaatgagctaaaaaaagatcggcgaaaagtaaaaaaactgcaacaacaattacaagatgcagcaactgcagatcagtaccgaatttgtggtgagatccttactacctatcttagtaaattaactccaggaatgaaagaaatcgaacttcctaacttttatgatgataataagccactgaaaatcaagcttactccagaattatcaccatcgcgtaacgcccaaaagtacttcactaagtataataagcttaaaacctctgtcgaatatgtaaaggaacagctaaaactgacaaatgatgaaatcaaatactttgaaaacattgaaaatcagattaaattagctgctcctgctgatattcaagagattaaactagaattacaagagcaaggttatattaaaaagaagaaaagtgggaaaaagcaacgaaaagttaaggtaagtgccccagaagagtttcatactagtgatggcactacagttttagtaggtaaaaataacctacaaaatgatcgtcttagctttaaaattgctaataaaaatgaaatttggttacatgttaaagatatcccaggttcccacgtggtaatccgctcaacaaacccatctgaagatacgattctagaagctgcacagttagcagcatacttctctaaaggtcgcgattccgataacgtgcccgttgattatctccctgttaagcgacttcataagccaaacggagctaaacctggatttgttatttttacaggtcagaaaacactttatgtaacaccacataagctttctaactaaaaagaggctgggaaaaaacttttgttttctcccagcctcaactgcttttatgaacaatagaaagataacgtggaactagctttgcgtcgccacaaggcttgagtctaagtacggacgataatcagcccgtgccgtgctaatcatcgtcctagcttagccaaccgccttgtcgaggaggttattttccacttcttttttatatctcccgaaatgtcaatttaagttagaaagaaagtagttgctcatcagtgacgtaggacatgaatacctcatatggagttcgatagcctagtgatttgcggggcaggttatttcgcttactcatcagttgggtcaccaattcatcaggaagattgcggaaatctagctgttttgttaagccgtcccggcgtaaaagaccgttgttgttttcgttcagccctcgttgattgggagcaccaacctcggcaaagtaagtgtgaaggtcaaattgattggcaatctcgcgccagccggcgaattcttttccgttgtcaaaggtaatcgatttgaagaagtgctgcgggaatttccgaagccactgacctaagtgttggttaatcgcatcagccgtcttttcgtgcacattgagtacaatttcgaccttcgattggcgttcggtcagggtcattaccgccccttggtgctttttgccttggacggtatcagcttcaaggtgtccaaattcagtggcatagtgcggaaagtccttggcacgctcgtgaatacttcgccccaattggccagccttcccgcggcgctcaatatagccattcgggtgccgcttacctcgcatgggcaaagcacggacatccaaaccgaactgcccccgttcaaacatccggtaaagagttcgccggttacaactaattgggcgctcagcgcgcccaataatggtgtcaggcgtccacccctgggcaattttgtcgttgatataagtaagttcagccagtgacaactgagtacgttttcggccacaacgttgcttattgcgcatatagtgatcttgataatcagcaattgaggcaccggtttccaggtaacgataaacgcgataaacggtttcggcgctacggttgatcatttgggccactcggtacgctttaagcttttgcacgaaagaatgggcgatgattgtcagctcgtttgtggtaagatgggtgtaagtcatttgtggtttcctttcttttgtttaggggtattcaaaagtctaccacaaatggcttttctatttttctaacttaattttacaaacggcgtctctaaattattctcctaaaaattgcatctgagcaccaataactcggttgcgggcagggattccacctttgactcgcaacgccttaaatgggaaggttgcacgatagttaacaatccctgataccggtttgggctccagcattttatcgaatttaccagtgaataattgagtaaaaattcctggtaagctaatatgaagtgcttttgataaaaaggctacttctggcaatgataatggttgaactttaattaaattaaattcaccatcattctcttcaaaaatcacttggtataatcctggctgttccagctttaacacagcaacactagcctggtcattgagattttggtaagttgacgaaggaagatcagccgggtagcgtaaagcggtggattgatagtttaacgcaattggtgaaaaaagatcagtcattgttcctaatggataagcataattaccatcatagacataattgaaggagtaacgttgcctatcgctactagcagcagtagttggcaattcatctggaattacgatgatttttacatccaagtcataattttgcaatgatttcaataatttactataactagcaggaataaacaaatactggggttgctctatccgtaatatctgcaaaatattttcaatcgttactggctcaacatagcgcttttcagctaactctggattaaacgtaactgaactaggattcgaatttacaatgacgttattaaagccctcattatgaagctcttttaacatcatagcaacaaagtaatcaccagaattacttaatcctaaacgtagtccccccgttccaattacaagggcatttggttgggaagttcggctaatttcattttcttcttcataagcagaataaaaactattagtatgttgatcaaactccccggccgatggttcgatttccttgtactttgtcaacaattgatggtctaaactcatctgataaacttgctcagaggtagttttccatagtcttgcaataagctgattgcttaatccgtaactctttgctttttgtaaaaccggttctttatttggatgctcagcaatttcccgaatcaacaaccgcattttattaatctgttcaaaataaaatgggtcaatctttgtcatctctgctaattcgttaactgaatatcctctctgcattgcttcaattaatacaaaaagtcgtcctgcttctgggtggacaattttggcgattaattggtcatcagtcaattgcttttgagcggcaagatgaaagtcagctggctcgtgataacgggattcaatagctttaaaaagtgcttcaatagtgcttcggccgataccaaaaaccgtccccaccgaccgtttttctgttccaagtaaacgactagcttttggtaaatcgttgaatccccatattggaacccgtgcagcaatatgatccatcgttggttcaataagagccgcatgatgaacataattttcgccaagatcaatgtcccgcagatgctttcccgcatataattgtgctgttacttgagcaattgggtaaccagttgactgcgacacaaacgctgtaattcgatcaaagtatggactgctcttaatgacataaaaacgatcactatttgtatccagggcaaactgaatatggtttgtaccaacaattcttaatttgcgagtaatagcaaaagccgtatcccgaatatcctgaatctgccgatcgcgaagtgtttggacaggattgaaagcaatcgaatcaccagcatggataccaattgggtccatatcctcaatcattgacaacatcatcatcgttccagaactatcacgttgaacgactacttcaatttccttatagccagcaagactttgctgaactactacctgttccgcacgcgactggctcaagcaagcctttaccgcatctgccaattcacttcgatcatgcacgattttacgtgtactgctactcttaggtaataccgaccggataataactggatatcctagtttagttgcctcatccaaagcatcctgataattattaaccgttacgatttttttaacaggtgcttccatttgacgaagggttctttcaagtaaaaccgcactattaatttgacgaatagttgcttcagggactcctagcaattgaatattttctttacgaataatccctttttctagcaattcttgggtaagttcaaaagcccgacgatttcccagtgtaggtaagattgcatcaggatgaaatttattaataatatccattaggctttcgacttttagtgggacaatacaaccgtggtcaacattttctaagcttactgaaaatgggttatcatctgccaagattgtttttatcttcatttgcttaaaaacgcgtgagacctggtaaatagcagagtcgagctcatcaccgtgttgaacatcgttggctcctgctccaataatcaatacagatttcaacttttccatcaatgacgatcccccctcctattcattgtatcaacgaactcatcaaacaagccatcagtttcatcaggccccggtgcaccatcgggaaagaattgaactgaaaaagctggatagcgacgatgacgaagcccttgaacactattatcaagcatgtcaacgtatgtaataaaaagctgggagcggtcaaccgaattacgatcaatcaagtatccttctgcttgagtcgcatagacaatgtggtcagtaataatttcatgaattgggtgattcaccccatggtgttcgaccgaaatttgctggacatttgctccattggcgattccgaataattcatgacctagtccaatagcaaacatcggtactttggtctggacagtacgaatcatttccaggaccgacctacgaacattatttgggtttcccggtccacttgaaagtacaaccccatcaggatctaaccgtaatatttcttcagccgttgcagtatatggtaagacagtaatattgcattttcgtcgactcaattcccgtaatattccgttctttaatccaaagtcaatcacaacaacacttagcccggttccaggattaggatatggcttaggagtagagacttgagcaacttgctggttcgttaaaacagtcgcatgaagctggtcaaaagcgtgatcatctggaactggaacaatacttccttttaatggcttttcagcttttcttaacttatgaactactgctcgcgtatcaatattagcgattccaggaatattcatttgttgaaggtatttatcaagtgtcaattgtcgtccattatcatcggtgccagcatcggcaagggaacgaacaataattcctttaattgtcggtacaatggattcataaatattacgttgaatgccgtaactcccgatattcggctgggtaaaaacgacaatttggttattataaacctgattagtgataatttcttggtaaccagtcatactggtgttaaaaacaacttcaccaaaagtaacagctggtgaaccaaaaccttcgccagcgaaaattgagccatcttcaaatattaggtatcgtgctgtcactgtcccactctcctaaaactttgttaataattgatcaatattattatgaacgttctctgaattaaacacaataattttattggtctgtcttacgtaaatgttcaagcatttttgtgaaataggctggtaatggagccgtaaaaaccatttctttgcctgttcgggggtgtttaaagcctaacaaacgagcatgtaaatattggccgttgccagtaagcgtttttcgcggtccatacaacggatctcccgccagcgggtgaccaatatatttcatatgaacgcgaatctggtgagtccgtcctgtttctaactggcaggcaactaatgtgtaattcttaaaccgttctaacacattaaaatgagttaccgcatgacgtccatcaaccacaactgcctgcttcttgcggtcctttaacgagcgacctaatggagcatcaattgttcctttatcttcttttataactccatgcacaagcgcaacatattctcgtttattagtttttgcttttaattgagctgtcaaagaacggtgcgccatatcatttttggctaccatcaatagtcctgaggtatccttatcaatccgatgaacgatccctggccgaaattctccgttaatagttgatagtggtgaatgatataaaagagcatttacaagcgtatggtttggatgacctggtgcaggatgaaccaccatcccctgcggtttattaacgacaataacatcatcatcttcatatacaatatcaagaggaatatcctcaggtgttaaatcaattttttgtggttcttctggaattatttggacgtggtcacctacaagcaacttatatttaggctttacttgttcgccattaacaaggacgtgaccatcttctatccaatgttgaatttgtgatcgggaaaattgatcaaagtgatgaccaagctgcttatcaatccttcccaccatctcaccatcaattgttaattctaattcttcagacatttgttagtctttctcctttaagatgcaaattattagccagattacgccaattgttaagcacatatccgcaatgttaaaaattgggaaattaataaatgttgtttcaaacatatccacaacatacccttgtcttaaccgatcgataaagttgccaattgttcctgccataatcaatgataagccaattagcataggaatatttttacggtactgccagataaagtaaccaattacaataatcgcaacaatagttataatggtaaaaaaagtttgttgcccttcaaaaatgctccaagcagcccctgaatttcgtaaattagttaactcaataataccaggaattaactgcttactaccaccaagaacaattgaagaagcaacccaagattttaataattggtcacaaattgttaaaattaaaataattacaatagcgatccccagtaacaattattgaaccccctgttgtttcaatgccaatttcaagcgtgcaattgctttggtggtaaaggtaaaactcattacctctccattcacagtaattgtcaccgtatgcttggtaaactctggctgacgaatatcagagattgggataacgaggtactgtttttgtaacaaacgattaaacaccattttagtcggagtgattactacggttcgtcgccgccattctaataaggcaaggattacaaaaactgcaaaaaagagcgcgctgagccactgaaaatgagtaatttcaagccaaattacgagaccggcaataaagaagagaaaagtccaacaccagctaataattgtccccgtaaggtctggttggtaaaaataacgagtttcttcttccataattataaatgtcatcctttcagaaaagaggtagttttatgatcaaaatctttacagatgctgcaacaaaaggaaacccgggccctactggtttgggaataataataattgccaatcataagcaaattcagcttgcaatcccagtagataaggaaagcatggataatcaccatggcgaattcgctgcagctcactttggatttaaatatttaattgatcactttagcaataatgaaacaatcctattttatactgatagccgtatcttaagtgacgcaatcggcaaaaattatacaaaacattaccaaaaagaattagcagcattaaatcctcttctccaacactttccaacagttgttacccagtggattcctgaaagccataatcgtggagcacataatttagcaaatcaggccctccataaaatagagtgattttagaaaacatcatatcgttttaattatatcatccacgtgttctatcagccaccaaacagagaaaaagccttagcggtcgttacaatgtaactcctactaaggcttttattattgggaaaatttgccccctagcacctattttcgatctttcgaatcgcttggaacccttgctatttaagggatttgatcttggagcgatcttttttgccccaatattggtagagatctgttcgtaaagcaccattataaagtttacgacgcttggtagcgggtgcgccataataattttcaaattccatatcagccgtcaaaatatatttactccatgtggttaatggacgatataactcacccatctgccggtaaagttcatgaactgattccttatcacttaaccgttcaccatatggcggattagcaacgataactccattaacttcgcttgtttgccagtcttttacggctaattgcttaaacgtaatatcgtgagttaatcctgccgcacgagaattttcttgagcaatatcaatcatattctgatcaatatcatatccgtggatatctaattcgatatcataatttgctaaggaatcggcttcatcccgaacttcatcagataaaccatctggaactaaattaacccattgttcactaataaatgaacggttgatgcccggcgcaatattatgaccgtataatgcggcttcgattggaatcgttcccgaaccacatacaggatcgacaaatggattatctgggaaccagtaagccagcatcaccaaggcggctgccatattttccttcaacggtgctccacctttatttttacgatatccacgcttaaaaagcccttctccactagtatctaacgtaagaagaacatggtctttattaatcgctacttctaacgggtaagtggcaccagtttcggctaagcgagtccgacggtggtatgcattactgaggcgttgaacaatcgcctttttagtgattgcttgaacacttggcacattatgcaattgtgagttatgactttttccttccactgggaaattcgcgtcaattggtaacaaatcttcccatgcaatgttttcagtacgatcaaacaattcttcaaaagaccgagcatcgaattcaccagcaacaatttttactcggtctgcggtccgtagccagagattagtccgaatgacatccttcattgtcccttgaaaacgcacccgaccattttctactttgacttcatagccaagatctcttagttcttttcctactaatgcttcaatacctgcagcagcagtagcaattaactgatatgtttgcacattaaacgctcctttagacttattcctattagctattttaccttatgttgctttaaaatgaaaagaagacgcaagaagaaacaaaaggaagcgagacagaagtcacttgttactttgtttttcgacgcgaaactagcctctgggagacctcgcaagcaacaataggcctccaatgtttggcttttttgccggacgttggaggccattgttgtactgcgtatttgctttttatgaaagtaacttaacttatgtcacaatccctttttgtttatgaatggtagttgactttaatctaactacattaatgaattctcatttactttatcagttaatattttataaacgcgttctatgtcccaggtggtgccacgagattcaaatgcgtccaataaaggcaaaccatattctttggcgtatgtcttggcagttattacatacatcttccctaaggttaagttcccactgccaattattcccgcacaacatttaacattgtcatagctttccaaataatcgtgcattggtgttgttaaaatctctgttaatgtcggcgtaaatctacttccaccaatcatatatgttggtagtaaaacaaaaaatttactatcgctttcagtcggaagtgtctcctctgaaatctccaataaatcgactaaaggattttcattattcaaatgatgttgttgcgttgcgtattcttgaagccgatgagtaaatgaccgtacattcccagaaaacgacatatatacaatttttattctcttattatccataattccctaacttcattatctaattttattaatcaaaagataagctaatttacaaataactcatttctaacccctttaacattataggcgcacttgcaataaaatgaaacgattatttatattttattgctattttaagtaatatctatcttaagcttctaaaatttaatttatcgccatttaactttttacttcaagcgagtaattattaacgcattctacaaaaagagaaccaataaaaccatactctgatttttaaaataaaaaaacccgagcgaactcgggtgcctgtatgcaagtatctgtaggccatgttttgtcgtaatataattatcaggcataattatatcgaggtaatcatctatctcagagtaccgaaatactctcccctggaatcacttcaatttgttatccaaagctcccctaccgtagtttgggtttaccgcttgaggggtttaccgcgttccaccaatatcgtttccaacattgtatcgtcactgtggcacttttcaggaatactaagacatagttaaaaccttagtccgtttttccgccgtcaccataaaatggtgccccgccttattttttcagcgagcacaaacactacaggcatcgcagcctgtgcgagcatggaccttcctaacacaacataagctgtgctcaattacccaaaacttgcaaaattattaataaactattcgacacgcactaaagcaaatgtgagtcattattatcattaccatctaactgtgaaccaaatacacgacgttctagattagatagacgctttaaaatatccatatttgtagcgctcgatacaggttgtcgggaagtagtttggctactcatagatgaaccaacttctacttgacgatttaattcatcaacctttgctctcaaacgttcattttcatcatttaaacgttcaagttctttgttataggtgtcgtagtctttaataacatcatctaagaaagcatcaacatccgcttcatcgtagcctttgccaatatttctctccttaaattgcttgtgcaaaatatcttgtggagtaaattttatgttatccaacttaaacacctcaattgtttagtttgcgtagtccaataactataataccaaatcaaagaaaaaatgcaagattaaaattcatctttttccctttgacgctcggcccattcttctgcctcttcttgaagttcatcaaaatcaacaagcgtcatcgaatactcactttcttctatatatttttgaatcgtctcataatcatacttagtttttccttcatactctggatcgtaaagaagaaaagcctcatcagtatgagtaagcataaactgctgataattccgtaattgttgtggcgattgataaggtttatctgaaacattagcaaaaaaatcaacttgctgggtaatatttgtcagcttcaactgattactttcattccattgcttaccaaattctgcaaagggaaacattaaagctgtttttaattgtggaaaatccgcttgaaattctaaagcagcttcaagtccccatctttccgttcccatttgtggtccagttattacccaaaattcatcatcatttaattctaattgagcccttaaatatttttttagcacctcttttattacttgaactttgggatcatcatccttaaatatatttagttcgtaacttcgatagccagtaatccataatctcttcataaaattctccctaaagcctttaacttaaacttgtaatcatcttgtatcaatcattatgtaacgagtctggtataataaatctctagttaggagagtgatcactgtgaccattcactatcccaatggtcagcaacctgtacaacactataatacacataatgaattaccgacaccacatcaatctatttatgccaaacgtgggatgtcattagaggatgagatcaatcatagtaatcattactatttggctcaccatattgctgttattcataaaaagcctacccctattcagcttgtaaaagttgattaccccaagcggagtgcggctgttattaaagaagcatattttcggcgaccatcaactactgattacaatggagtgtaccgtggatactacattgattttgatgctaaagaaacacgtaataaaaattcttttccattaaagaactttcatccccaccaaattcaacatatgcgtgaatgtgtagcacagggaggaatttgttttgctttcattaaatttacggagcttgacctgctatacctgcttcccgcttccaacctgtttaaatattgggaccaacagcaaaatggcggccgtaaatcaattttgcgaactgatatcgctaaagaaggctatcaaattcattatcaactcaatccgcgtttaccatatttaaacgctgttgataaaataattgctgcaaaagcgtaaaggagtttactatgtcaaatgataatcagtcaacgcgtagtgagcgtcataataataataatgacaatcaacagcgcaatgttggcagcttaataaagaaaatcttgctatgggtagcaggaatcgtcgttctactaatggtggcatctgcagctttatttttctactatgcctcaagcgcgcctaaaattagtagaagcgacttaacaagtcagagtattacgactatttacgatgatcaaaatcgagtaatttctcgtttaggagcacaaaagcgagaatatgccaaggataatcaaattccaaagcagttaaaaaatgctgttgtttcaattgaggatcgccgcttctacaagcaccatggtgttgatacaattcgaattcttggagcagccacttctaatgtttttggtcgttcagccgggatgcaggggggaagtacgctgactcaacagttagttaaattatccgtcttctcaacggctgcctctgatcgaacattaaaacgtaaagcccaagaagcatggcttgctattaatgttgagcagcattttagcaagagtcaaatccttgatttctacattaacaaggtttacatgggaaatggaatttatggaatgcaaacagcagcccagtactactacggtaaagatttaaacgatcttgacctttcccaattagccctgcttgctgggatgccacaatctcccacttactataatccacttgtaagtaacacaaagtatgcaacgcaacggcgcaatgaagtattgaatgcgatggttcgcagcaattatattacccaatcccaggctaaccaagctgcaagcgacagcgttactgctggtttagaccctgatcacggtaatatttcgggaagcggaactgctgtagattctaaggttgtggatccttatgtaaagcaggttcttgctgatttacaggcacaaggatacgacccttatagtgatgggttaaaggttcacaccaatcttgacctcgatgcgcaacaacacctttatgatgctgcaaataaaaatgttcagttccaaaacgataaaatgcaagctggagtggctgttaccgacccccacaacgggcaaattattgccatgctcggtggccgtcacacaggaaatgttgtgtatggacttaaccgagctgtgcaaagcaatcgtagttctgggtcaaccgcaaagccattaatggattatggtccggctatcgaatacttgcaatggccaacttttaaatcaattgctgatacgcggtttgtctttcctggtaccaacactgtccttcatgactttgacaaaaagtacaagggtaatatgacaatgcgtgaagccttagttcaatcacggaatgttcctgctattcgcgcattgcaagctgttggaattaagcgtgctacttctttccttgatggattaggaatttcacaaaaacaaccatatactttacaaaacgggattgcgctgtatatctccccactccaagtttctgctgcatatgcggcctttgctaatggtggtacttactacaaaccttactacattagctcgattactactcaagatggttcagtaaagcaattcaatcctaaaggtaaacgcgcaatgaataaggctactgcctacatgattactgatatgcttaaaggagttttcacagattcacaaggaagcgcaactgacgctcgactcgacggtgttaaccaagctggtaagacagggacgacaaactaccctggaaattctagccagtctggcgtaatggattcctggatggctggttatactaagaattactcaattgcagtttggactggttatgaccacccactcgaacctggtggcagcatttcagaacagtatgtaaagtcagcgcaattgctttacaaggacttaatgcaatatcttgacagccaaaatcacgcatctgattggacgatgccagacactgttgaggctgttcgagttaaaggtaaacgtcagcttgtaattcgtgattcaaaatgggcatttgattacactgaagatacatcggatgatcgtgatagtagttctacttctagctcaagcgattcatcatcgtcttcatcttcttctagctctgcttcaagtagtagcagcgaaagtcgcacagaagaacgcaacaatactccagctgagtcttcatcaagcagtgctccggctagttcaagttcatctgcacccgcacaaagttcaagttctagccctgcctctgctacacaaccaagcacaactaatccctaataagatcttttaaaaattgaagataataaaaaggattgtggaattttctccgcaatcctttttattatcaactttttttaataatgaattgtacgttttcgccgaccattttgtagaatatagacggcaataattactaaaataattcctaaaatttctgcccaattcaagttcaatttaaagaagatcacacttaaaatcgaagttgtaattggttgaacagcatccatgatactaactacatcagatggggcatatctagttgcatgaagcaaaattccaaatggtaaaatcgttccgaataacaccaccgtcgcaaccgatgctactaacgtggtagtaatatgtggtggattgacccaaaatggccggtagaggttaaataggactccggcaatcatcgtcccccacccgaggacaacaattggcggattttcatcagcagcacgttgtggaaggacaacatagaatgcagctgtaattccagaacctaagccccagagaagagatacaaacggtaaagctaattgggtaaggttaccacgcgtaatacataatgctaccccaatcaaagcaacaacaaacgcaataatatcactcctgaacggacgacgatgcataaaaataattccacctaacacaataaaaagcggggaaagatattgaagaattgttgctgctgaggcatttcctgtttgaatagcataatagaacgtaagcaggtttgccatcaatcctaaaatagcataactaataactgaaatagcagttgctcgtgtcttaaatacgttaaaaatcttttttccatataaaaatacactaattactaataaaattactcctgctgaaaaagtccgcattgagagcatccacgtagcaggaattgctaaattttgtgagatgagttgcaaaacggttccggatattccccacatagcggaggcaaccgctgcccatataattcctttcattacttgagaagaagatttttccatgtcaaccaccctttatttaattttattcgcctaatttataaatcggtattttaggcttttttaatgtcttcttttctggcttttgtccagcctcttttcgctgttcaaacctcttttcgtgctcattgatatctctttctgtccgtaagccctgacgatcccagctttgtagaatccggtccatatattggagatttagcgcactattcattactgcctgccgtaaagcaagtttaatcattattgccgaataattatctttatccaaccaatcattaacaatttgcaattccattgatgagagtggccggccaaattcggcctctagctgattaaatgtctcaacccgactattagtattttcaaccttaattgtttcctcttggtcattctcattgagcaatgctaatttattgataaggagcgaaaaatcatatattgcatcttctttaccatcttccatttttcgcatcttctgctcaacaagatggtttgtcatcatttggtgaagctgttcaaacacctgccgctcttttgttcctaagttctttgcaattgtacgaacatccggattcattattcctcggtcctgataggatttgaactgaagatataagacaaattgagaagttgtcatccccaactctttataatgatgtagcaataagttgcttatatttgtttctcctgcctgcaaataatgttgtaaaaggcttgcatctggcatttaatcagctcctctcttagtaaaatatttttgcaaaagtaaagagactgagtaatcccagcctctattagtttcagcttttattaaaggttattaatattttgaacgtattgtccagtcttaaaattaatcagatcgtagcagaggttccctttttgattacgatatgttacttcccagacaatcttgtcattaaatatcccgggagcaacttttaaaatttctcgcagatcacgatttgattttgtcatcgctcgtgctctcgcagcagtaatcccacttgattgttttagaactctgatcttgccaccgtgttggggaaccataaccaagatcggttggttttgctgattcttgccactaatcgtatagtaagtattctctcgattataaatataaaattggtcaggagattgaagatgagcatatttttcagcaagtgaaattgtctgtcgtcgcgctgaatttcgcggctgattgctaactgcaaaaacactccacactattaacaagattagtaaaatcgcaatcaaaaggttacgaattgtccgcattgaggaaccgcgactttgttcacgctgaacttcacgtcgactttgcatatcttttccctcttatctctttagttttttagattcttatatgacaatcgttttcgattataccagaaatcggtaattaaaagttgataaagtttaattaactttgtcctctttaccatttcgtaaaaacttctgagtaattgaaatcaagtcagcagtttttttgctattaaccggtaaatcagtgggcagactactcaaaatcgtcttcccataccgtcttgtctgtagtcgtggatcaagaactactgcaaccccatgatcatcttctgtccgtaataatcgtccaatcccctgacgtaaccgcatcgttgcttttggcaattctgaatgatagaacggatttttcccctgctgctgaagtaacttattatgagcacgattcattatttcatcaggcgaatcgaacggtaagcgcgtaataattaagagttcaagagcggactctggtaaatctatcccttcccaaaaactagaagcaccaagaaggatcgaattttttccaccactaaactgttttaagattttatcacgattacccgtaattccttgggctaaaatatcccgctgatcaaatagatccgtttcacgaagttggctatatacctgctcaatcatcaccagtgagttgaataaaatcattgtctgataatcagcattcttcgttaattggtaaatcgtgtcactgagatatttaatgtaatcactgttattttgagcgctcggtactggtgcatcttctgcaatcaataatttagcattctgtttgtaattgtatggagatgcgaatcgacgcgttaaagtattattgcgctctaaatctaactggtggtaaagatacggcgatcgtggcgatgtaaacaatgtcgcccccacaaataatggttgagcaaaatatggataaacattctttgtgaggtaatgggttgcttccaatagccccccactaagctgtaaggcactttgttcacttgattggcgaatagtaatccaaaaagcagcagcctctccttgttgttgaagtgtttcgttaaattcatttagtgtctgatcggcttcaattaattttgcaagctgactttgaaattggctcatgaggtaacgatcacttaataaccaccggtctggctgactgctaaataaatgactgagggcagaaaaatgaagctgcacactgcttaatgcctgctctagcttcatcatcacgggcccactaatatctaaaagagccatcacttgatcattttgtagtggttgttcaattaattcattatcaggattaccagtagcgcttgccatatattgacggtaaagggcttgctggaaaaggtcaaccgcttcttctactgcattgagatcaccacgaagcaattcaacattataactgcctagtgcctgttcagcgaaaatatcagttaagttccggtcattgccattattaactaatccagacattatatgaactgctgtgcgcaatttttgaaaattaaatgttcgccgtgaccgttttaagatactttcgcttaagtgctgagcttcatcgattactaagtatgggcgacgagttccatcccctaattcctgggcatgagcaaccaagtacgcatgattcgtaataataatatcagcttgatgaagccgcttttcccgccgaacgagaaaatcatcatggtaaaaggcatttgctggattcaagctccgaataccctgatgacgaatttcagtaaagtatggcgactgctgagaatttaaattaagttcatcaaggtccccactttgcgttgaaagcagccatactaaaattttagcttttaacaactgaacaagcttcgattcttcaatcacacttaaggaatgaacaaaacgtgcaatatcaatataatgagcgtttcctttgataatcacactattcattttaaaaggcaacaccttatttaactgtgcgattgatgtatcaataatttgttgctggaggatattagttgctgtgctgacgacaatcttcttatcaagatatgcaacataacttagcggaaaaagatagcccaatgtcttccctactccagttccagcctcgacaatcatattttggggttcagcatgagtataattattgtaaatgctgttcatcattttggcttgaacaggccgcaatctcaacgtatctccgtatagcttttcctttgcctttttagtggaaggatatttatgcttttctcgctgaccattagcagtaatcggccgcgatttatgaagaacaattccgtgagagacatacaactcttcgcttaatggctggggcgatttacgtcgacgctgcaattcagcatcaaaaaccccggctgtttgctgaggtaggttgagcttcaactgagtaatcttttcaagcataagcgttggtaattcttgaactcgttttaacaagtcattaagtaagtctgcagttgcctcagcgtctgatactgcactatgagggtgatcatgctcaatatgcaacgaactagttaagtctcgtaaacggaaactctttgcagtaggaagaagaatctgactaagggttacagtatcgattgcaggaattgataatgagggatatccagctcgctctaattctgcatttaggaaaggaaagtcaaaattaacattgtgagccacaaaggtcgtttccgccaacaaactataaatagttccagcaatgtcctcaaacaaaggtgcttttcgtacgtctttatcttcaattcctgttaattgaacaattgaacgaggaattttctctcgtggatttatttttgtttcaaagtgattcatgatttcgccatcttgaacgagaacacaaccgatttgaatgattcgatcaccatgattaacattcgttccggttgtttctaaatcaacaactgagtagattggcgctttcttgtcacgcttttttgtgcgctgactactacgctgtgtcacactatcaccatatttctccgaagttattatattaagttactaaatattctaaactaaatgatacaccattctactataaatttctcatttttacacgaatcggcttttctttgtgctaaaatgtttagatttggtaacatccacaatcgcttttagctagaatcactgttttatgctatgattaagtttgaatttttatatagaaagtaggttacgatggtgaaacaacaagggattggtactagccatgcgaaaatcattttaatgggagaacatagcgtagtatacggtcaaccggcaatagccttaccattgccaagcgttcaattatcagttacgctcagcagtcgccaagataaccagcgaattattaaaagccgttattatcatggtagtctaggaaatttaccttcctccatgatcggaattaaaaaattaattgacactttatctgcaaggtttaatgaccacgaaactggttgggacttaaaaattgaaagtcaattacctgctgaacgaggaatggggtcgtctgccgccagtgcgattgcaattattcgagcattctttgattattatgatgaaccactcgatcgaacattattgcttcagcttgcagatgtcgaagaacaaattacacatcgtagtccatccggtttagacgctgctactgtcagttcagataaaccgcttttttatgttaaggggcggattggggtaccaattgaaatgaaccttgatgcctctttagtaattgctgatactggaaaaaaaggtgctactaaggaagctattttggcagttaaagatgaactgaaaaataacaatgaaaaagctgaaggacatattaagcatctcggtgaattagtaaaccaaacaaaagactatcttacacaaaatgacattgtaaaattaggcgatgctcttaactttgcgcaaactgatttagctgctctcaacgtgtcagaccatcattagatcaccttattcatgttgcacgtgataatggagctcttggtgcaaaattaactggtggtggtcgtggcggttgtatgatcgccttaatgcaaacagctatgggagctcgccgccttgcaagtatcctaaaagagaacggggcacatgatatttggcttcaaccacttgataagcgaggtaataactaatggcaactgcaaaagcacatactaatattgcgcttgttaaatattggggaaagaagaatcaagaattaatcattccacaaactgacagtctctcccttacgcttaatgagttttacaccactactaccgtaaattttgataatcaccttacttcagacttagttgccatcgatcaacaaacacttagtaagaaaggggccaaaaaagtagttcatgttctagatattgttcggcaactaagtggaataaaagcttttgcacgcgtaaagtcaattaatcatgttccaactgcagccggccttgcttcctcagcttccgcatttgctgccttagcaggcgctgctagtactgcggccggattaaatctctcaagccgtgatctatcacgacttgcccgacgtggatccggttcggcaactagatctatttatggcggattggttgaatggcaaaaaggaactgatgatgcatcctcgtttgcacaaccagttttagaaaatgttgactttccaatcgaaatgttagcagttttagttgatacaaaaaggaaaaaaatttccagtcgatctggaatgcaatccagtgttgaaacttcaccctactatgatgcttggcgccaagtagtagcgaatgatatggttgccataaagaaagctatcaaagcaaaagatattgaccaaatcggccatattgctgaagaaaatgctcttcggatgcacgcacttactttttcagctgaccctggttttacctactttaatggtgaaacgttaaccatcattaaagcagtggaagacttgcgcaatcagggaataaactgctattatacaatggatgccggtccgaacgtcaaagtgatttacgaccgagaaaaccggagcaaaattgttgaaaaattaagtaatattgttggcccagaacggttggtggtttcacaaccgggacctggaataaagatttggaatgaataaaatttaatgataaggggactttaaattttgattactgaaaaagctcccggtaaattgtatattgccggcgaatatgctgttgttgaaaatggttatcctgcagttttagttgcgttagatcaatttgttacctgtacaatcgaggaaagcactcaagaagttggtcaaattattagtcgccaatataataacgatcaattatcctggcgacgtttaggagaccaaatggtagttgacaaacgtgataatcctttttcttacattctttctgctattagagttacagaagaatatgctcgtacttttagtcgcgacttacgaatatttaatatccatattgacagtcaattagacagtgctaatggtcgaaaatatggtcttggttcctctgccgctgttactgtagcaactgttaaggctctttgtcggttctataatttgcccgttaacaaggaccaaatctttaaattagctgcaattgcccattttgaagttcaaggaaatggttcgttgggtgatgttgccgcttccgtatatggtggttggatttcctatcattcattcgatcggcagtggcttgcccaacaacgtaagtatcttgacctaaagacgatcattgatttaccttggcctgatctgaatattgagtctctaactgctcccaaaaacttagaacttttaattggctggactggtaaaccagcctcaacttcccaacttgttgataaaatttctctttttaaagctcgtcgtcaaactgaatatcatcattttcttgaaaaaagtaaatcatgtatccaacgaatggttgatggttttcaccgtcaagatcttgaagcgattaaaaatgaaattcgttataaccgtgacctcttaaaacaactcggcactaattcgggggtaaacatcgaaaccgaatcattatctaagctttgccaaatcgctgaatcttttggtggggctgctaagacatctggtgctggtggcggtgattgtgggatcgtcgctattgatagcaactctaactttgggaacgttctaaagagctgggccaaaaaccgcatcgaacaacttcctttatccgtacactttatcgataacgcaaaaagcttcaagaaatctgttaagcaccatctttcttacattcacaagtagatcaaaggaggctccatgatggaatcacgtcatgcccaacgaaaaaacgaacacctttcattagctgccaaatattatgaccaggttcatcaacatcattattttgatcaagtgcgtctaattcatgatagcttacctgaaatgacaacagatgatgttgatttgcatgtccagttagctgataatttagaaattgaatgtcctttttatattgaggcaatgactggcggaagtgatcaagcacttaaagtcaaccaacaacttgctcaattagctcataaacaccatttagcaatggcaactggatctctcagtattatttcaaaagacccccaatccttttcgtcttttgaaataattcgcgaagaaaatccaaagggcattatttttgcaaatttaagtgcaaatgccagtcttgaccaagcgataaatgctatttcacttttgaaggcaaatgcccttgaactgcatatcaatgcggcccaagaattaattatgcctgaaggtgatcgcgattttaattggttggataacatccaataccttgtcagtgaactagaagtcccagttattgtaaaagaggttggctttggaatgagcaaaacgacgattgccaaactgcaaacccatgacgttcacctcatcaatgttagtggtcgtggtgggacaaactttgcagcgattgagaatcggcgtaaccatgatattaattttgagagtttattggactggggacaaacaactcccgaatcactattggaagctcattcaattcggcgcggtaaaactgaaattattgcctctggcggaattacttctcccctcgatgttatcaaggccggtgtattaggcgcccgggcagttggtgttgccggttacttcctcaatattcttcaaaatgaaggctatgaagcattagaccaaacgctcggtgaatggcaagtgattgtcaaacgcttgctcgcgctccttggttgctcatcatttaccgagctttcacgtgttgaatatgttttaggaacagacttactatcatatgctcgtcaacgacacttacgctaacctaaataattgaaattcctattaagattgatacaattgatttaataactaaaggtttggatggtgattgaagtgaataaaattaattggggcaaatcaattacagttggtataacggctggtcttgttgccggccttgttaaacttggttgggaaaatattctcccaccacggacaccagagcgagatcaaacaaacccaccacaaaaaatgcttgagcaatttggcgttccaacacagattacacatgctacttatacctattccggccaacagttgccatgggtaagctatgttgttcactttagtttctcagctggttttggagttctctatagtatcggtggacagttagcgccgtggatcaaaaaaggcgatggaataccattcgggattgctgtttgggatttcttccacctcaagttaatgccattaatgggaacagtgcctgctgcaaaagatcaaccacttgaagaacatgtttctgaatttttaggacatgcaatctggatgtggacgattgatgcattaataaaaagtaaaaaataataaaagaggctgggaaaaaactcctagtccaaaatcgagtaggagataattgattagttcaattatcgacctctcacaccaccgtacgtacggttccgtatacggcggttcgacaacttaatcacattgaattgactggagcgtcttggacatattcataagtccgagttgttccagttttctattagttagagaatagctcaaggtcttactgtgtgcagttcgccagtagcccttgcgggtactagcgaagacatatgcatcacgctgggacagccccagcttctgtaagttagttaccttagttttaagcttcttccattgcttccagatatactgtcttattcgggccctcaaccacttgtcaaggcgttgaataaagtcagttagtttcccaattgagtagtactgaagccatccacgcatttttcgatgaatttcttcaaacattcttgtcagggatattccacgattacgtttagttaataacctcaatgctttctttactcgttgttgcgattgttttgctggacgggcgtaggctccattgtggtctacacccaacgaaaagccaagaaactttaaccgtagcgggctaccgactttggttttatctgggttcactttaactttcaatcgcttttcaagaaactgggtaatgcttcgcattactcgttctccggctcgttgacttttaacataaatgttacaatcatccgcatagcgcacaaagtggtgaccacgtctagtcaactctttatccaactcatttagatagatattcgccagtattggtgacaatggccctccttgtggggttcctttttcactcttagcgaaaagcccatggtctaagactccgctagttagaaacttacgaatgagccttagtgtccatgggtcatcaatatattgttgaagatacttaatcatcaagtcatgattaacattatcaaaataggcttttaggtctaagtcgacaactcttcgataaccttgattataaagatctactacttttgcaatagcgtcgtgagccccacggtgagggcggaagccaaaactattatcagagaaaacacgctcaaagataggtgtaagaatttgggccacagcttgttgaaccattcggtccaccactgttggtattccgagttttcttactccaccattaggcttcggaatttctacccgtttgactggtgctggtttatacttgccctcacgcaaactagcgatcaattccgtcttattttctctgagatatggcagaaggtcattgactgtcatatcgtcaatgcctgctgcccctttatttctcttaactcgcaaataagcctgattaaggttattgcggtccaagactaagtcttggatagtgacactcatacctttaccttcaccataatcggtactacgcgcccttgtgtactttcggttttccaaacctatcctcgacaagcggtcagcttgttgttctgttttctgcgattgtcgcacctgattacacctccgatataagttacaagttattgtcgttcagtccttcatctgattactcagactactatgacctcggctgacttctggcttactcaacgctacatcactgcaccgcttgtttctgtggaaattaaacttattcctcttgtcggaaacgtgtaggccagatctccccgggtaaggatattaactttcgtaccatgtcaccggtagctttactgaaagtaacttcgagtagtgttggactttaacttgtcatgcagtcttatccagttagttccagccttatagctacttcttgttcatcggtgcagtactttgccttagacttccttcagattccacctcgcagtggacacccttgtcctcagctcatggttccgactactacggcccatagcggactctcaccgcctagctaatacccatgccgggcgcacataaaaaccggatgatgaattttttgaacaattcatcatccggtttttatgtacacaggaaatcgttcctgatatgatgtaattacccctaaaaacaaccaaagggagcgatttccatgtatcaaaattataccataggacaaaccgaattcgtactaaactataactatgatttaccacaaaatcatattgcgcggctaattagtgattttgtcgactcgattccacaaaatgtgctattagaagattcaggagcggctaccggccgcccttcatcgcatccagcaattatgcttaagattctcttgtttgcctactcacgtcaaacttattctggaagaaagattgaaatgatgttggataagaacctgccaatgcgttggttagcccatgattatacttatagctaccataccatcaataactttcgacgcagtcagcacgctagtaagctaattaaacatgcctttgtctactttaccatggctttgaaagatcacggactaattcaaaatgatgcagtttttatcgatgggaccaaggtagaagccgatgccaataaatattcatttacttggcggcgggcggttgaaaagtatcacgctaagttaagagaaaagacgagtaagctttatggggaactagtagaaaaacaagtggtgcaagaaatggcacccgagctggttacttctgccgaaggcatggaagtaatgaaacaagagcttgcggagaaaatcattaagttagatgaagagattaagcaagaaccaaaaatcatcaaaggtggttcagttagaaaacggcgccgtcgttttctaaaaaacttcgccatcaattaagcaacgacctaattccgcgtgccaaaaagtatgaacgtaccgaagatatcttccaaggtcgtaatagctatttcaagactgatcatgatgcgacttttatgtgtatgaaggaagatccgatgatgaatcgggagttgaagcccggctataacctgcaaatcgctacacataagcaatttgtccttgattacgggctcttttcaaatccaactgacaccaggaccttagtgccatttcttacccagtttcatgctttagatttctttaagcatatcgttgccgatgccggttatggtagtgagtacaattacacaatgattcttgatcagtttgaaaagcagcctgttattccatacacaacttatcaaaaggaacagaaacataaatttaaaaacgatccaactaaatcacaaaattggcagtataatgccgaagatgattactacatcgatcatttaggagttcgctttagcttttatcgttatagtaggcgaaccgataaatatggtttcgaacgtgatttcaaactctatcgagcggataagcaccaactgtcagaacaattggatgagttggcaaaaacaccaagtggtcggcaacactatatgcaggttaacccaacgtggaattattacaaggctaaagtaaaagcaaccctctcaagtgacgaaggcaagacaatttatcgtcgacagaagttcgacgttgagccagtctttgatcacatgaagagggattttggcatatgccgaactcatctacgcggacaacgagctgtggaaaatgacattgggctagccctggtggcattaaatctaacgaaattgggacaatcaattagtcgattggcgactaatttcataaataatttaaaatccgaactacgatttttggatcgatcaaaaatcatagtccggattttactgttagagaaccaagaattaatagttaattcccagcctcttttattattttaaattatttacctttaaagtaatgcacttcggaagtgaagtcccccgtacgagtcgggtcacggaacaaaccgacattcatcaattcatctccaccataagtcttatcagtcatttcatcatgataatcaattgttggatcaagccctgccatcttggtattattaatttcaaaacggttagtatgcaactgcttaaacataaatagcagtgcttctgacttatccggactgataaattcccaggcgactgtattgctatcaaaaggactttctaagcgaataaagtcaccatattgaattaagtggcggtgagccttataaaacttgatctgttcctttaccatttgccgatcctcttcagtcaaatctgctaagtcaagttcatatccaaagaccccactcatggcaacatcgccccgcatctcaaaactggtagaacggccagtttgctggttaggtgaaaccgatacatgcgccgtcatagatgagattggataagttaaagatgttccgtattgaatctttaaccgttcaaccgcgtctgtatcatctgatggccaactttgcggcatgtagtaaagaataccagcatcaaagcggccaccaccgccagaacagccttcaaacaagatattaggataacgggtaactaaccgctccattaagtcatataaacctaaaacataacggtggctaacttctccttgatgttctgcatccgctgcgctagagaagacctcagtaagattacggttgaagtcccatttaatatagtcaagtggcaccttatctaaaattaagcacatttgattgtaaatattatcaacgacttctttacggctaaagtctagcactaattgattacgagaaagtgtcattccacggtttggttcatgtaaggcatagtctggatgttccttatataacttagagtcaactgaaatcatttctggctcaaaccagagaccaaatttcatgcaatgctcgtgggtccggtctgctacccgctttaatccaccagtaagcttatcctggttaacaaaccaatcaccaagcgatgaattatcatcattccggtggccaaaccagccgtcatcaagaacaaacatttcaattcccaatggctttgcttcatcaataatttggtctaacttcttatcatcaaagtcaaagaaggtcgcttcccagttattaataacaattggtcggtctgcatattgatacttaccgcgagcaacccggtctcgtaataacttatggaatacttgtgacatcccatttaagccacgctgactaaagcccatgattgcttcaggtgtctgaaaatcttttcccggttcaagaacccattcaaagttataatcattaattccagttattaagcgaatctggtcgatctgatctttttccaaggtaaactggtgattacctgagtagacaaggagcactcccaaagcatttccctgaaattcatcggtgttcttgtcaaccaaggccacaaacggattcatatgatgagaactagaatttcgacggctagaaaattctgttattccccgacgtaattcttgccgttcaggttgccgttcaagagcatattgtcctggaacggagataacgtcataatcatgtttagttaaatccagttgcattgaggcaatcttttcaattcgtaattcttgattgcttgtgtttactaaccgcgcattccgtgtaataaccggccgttcgttatagatggtgtatgaaagaataagttgtgcaccgattgttttatcaaccaaagtaacttccaatgtttctgcttctttatcacttttaacataagatgcaggtaatccagctagtttgggcttccccggtaaaatcttataagacttgtaacggaaatcagtcagtcgtgaaccattttttgttttgataataattgcaggcacacgatagtctccggtattgtttcccgaatactcctgcaacaaatcatctttagagtaagttcggtccatcgatccaggaaggttccctgaaaatccacgatcaactcgtggatatcggcgttcaccatggtagttacgaattgccggtccaaaataaaggtgactgaggatatttccctcttctattgaaaataaataggaaatttctttattttttaagtgaaaaacacgttgttgttcatcaaatgtaatcattcgttgtggcccctttcttgaaatcgattctataataaacgtttagttatttctcgtcaagcgctttcattattgatatgccagcaatcatccgtcaatattggctactaaacgtttactaaaaatatgttatgctagaaattgattaaaaggaggttttcctatgactggtatcagaaaaatagcacgtgaggctggtgtatctcctgccagcgtttcacgtgtcttaagcaatgattcatctttttcagtaggtgaacaaacaagagcacgaattaaaaaagtagcagcaaagtataattaccatccccacctaaacaggaccgttactccgccgccaactcctcgttcaattctagtgcttacaactcattcgctcgagacagaagctcatgacccttatttcattcaagtccatgatggaattattcaggaagcttccaagcaaaacattcaaatcaaagcttttgttcgttttcccaataaagcctttcaatttactgacgctcaaaaatatgatggcgtaattgttgccggagtttttacgcaagaattctacgctaatttagctaaaaacaatccccatatcgttttaattgacgactatcgatatctccccgcttacgatattatccgtaattcgtattttgaagccactcagatcgttcttgatcagttactagaaaatggacttaataaaatcgcctttatcggtggaaatattcatcccatgaataataatggcgaaacgacagactcgtatcaagatattcgagctaaggcctatttgatgtggacaagacttcataatatttctccattgattgtccttaatgggtggactcctaaagatggctttgacagcatgaatactcttttgaaagataattttcaggccgccttaatagctagtgaccaactaactatcggcgcatatcgagccctgaagcaacaccagcttaaagttccccaagaccttcaaattattagctataatgattcggatattgctgaatatttagttccgtccctttcatcgatcaatccagcgagtttttcaatggggacaatagcagttcaaagactagtccaccgtctgaataatccaaatgaaatccctattcatattaatttgcctgccaaagccacttggcgcgaaagttcagaaattaatttgaattagtgaaacgttttataagtaaaaagagagtaattgtgcttgtgataccgttttctaaggtttatactcaaacatggttatcagattgataaacgttcactttaattaaatgaggtttttgattatgttattaggaagtattgaagctggcggtactaagtttgtctgtgctgtcggtgacgaaaattttaatgaaattgataaaaaaatcatccctacaaccacccccgaagaaactttaggggcttcaattgaattttttaagcagtaccctgaactagctgcactttcaattgccagttttggaccaattgatactaatccggctagtgaaaagtacggttatattactgatactcctaaagttaagtggcaaaattgcaattttgtcggcacaatgactgaagccctcaatattcccgtctactggacaacggacgtcaatggttcggtttacggtgaatatgtcaatttaaaagataagtatgataatccggccttggtttactatacccttggaactggcgtgggtgctggagcaattcaaaatggccgctttattggtggaattagtacccctgaaatgggccatgttcgcttacaacgccacccagctgatctaaactttactggtatctgcccttaccaccacgattgcttggaaggattggtagctggaccaactttcaaggcgcggctcggtattagcggcgaagatgttcctgataatcaccctgtttgggatatcatggcctattacgttgcacaagcggcagttcaggtaactgccattttgcggccacaaaaaattatcttcggtggaagtgtttcgcgcccagcctttcttgaacgggttcggaagcaatttgcaatgttatggaatgactatcttccagttggatcgctcgatgaatatattgtcaacccttctgttccaggaaatggctctgctactctcggtaattttgcattggctaaacacttaatcgaaacaaataaataaccatcatcggtcactataatgcaaaaatgactaagactgaggaaaatattgctcctcaatcttagtcatttttatttatttccaaagatagttcaatagacccgctttagtcattccattggctgtcgtttcacgcaaaactgatgctgaattaattaaagcctcttgttcacgcgaatctaatggtaattctactaccctttgaataccatctttatcaattacagccggtgtcccgaggtaaatatccttttctccatattcaccatctaaatatgcacttacgggtaatactgtactttggtcatacaaaattgcttttgttattcttgccaaagcagtcgctactccataatatgttgcgcctttccggccaataatctcataagccttattacgtacttgttcttctagttttaacaattcttgctttgttagcccattagctaaaacataatccattaaaggcgttccaccgattgtcccacaagaataagcagcaaattctgaatcaccgtactctgctaacatatcaacatgaacatctcggggatcaattgctaaccttttaccaagtgctactcttaagcgtgccgaatcaagagaggttcctgatccaattactttatgtgctggaaaaccagaaattttttgaacagcatatgtcaagatatcgactgggttggcagcaattaagaagattccattaaacccggtattaactacttcttgaacgatttccttcataatctttaagttacgttcaactaatttaagccgtatttcacctggcttttgcacagcacctgcacaaatagtaacaatatcagcgtctttacaatcttgatagctaccagccttaacctttactggggcagtaaatggcgttgtgtcttccaaatccagtgcatccccaacgcttcgctcattactcttatttataataactaattcctcagctaaaccttgctggatcacgctaaaagcataagcggaccccacaactccatcaccaattaaaacaaccttttgatgttcttctgtcgccatactcctttttctctccctaattaaaatttacataaaaagatgagcataaataggaaccaaaatgtccattgctaacgaaacgataacaactgccactgcggccattgctccctgaattgaccctagttgaaccgccttagcagatccaacagtgtgaccagcggatccaagaccaagaccagttccgaccttagaaattttctttagtctaaagaccttaatcaggaattcggcaaggcaatatatttaactaaatcccatcccgttggactgaatagcaagataaaaagcatctgaatactttccatcaaaatccccacaataaaaccatgccacggcgtcattaccttaaaataactttttcgatcatgatacaaaaaaccagaaagcgcaccaatcaaaactgagctgggcacataaaaccaaccttgcaggggtgcacttgaataatccgatggacccccgctactaatcctactaaactaccaacccatggcccaccaataattccagcaactgaaacagccaaaattcggacattgacaatcgagtcatttgttgaaatggccgtaagaataattttattatgcaactggttattcgcatcgatctctattccagtcatattagctataatagcaaaaatagaaaaaagaatcgttagctgaattttggcactaatggtttgattaaataacaggcggcgaaataggggtacactaaccagcaaaaacgctagaataataattaaaccaacacgctcagacattaaaattgttaaatatatcatttatccttgtgtccctgtatttattactggttgcgttccccgttcactaataattgctaccatgatattattgataatttgcaaacgttgctcatctgttaaatcaaggttggcttccttgcttaggcgttcaatcgcttcttcagtaattgaaacagccccctcaacgattatcttgcgcgctgataggattgctgatgactgttgtttttgcagcatggcgctcgctatttcagttgcgtaggctaagtgcgttaaccgtgtttcaataattttgacccccgcgacatttaaccgttcttgcagttcagcagttaaacgctctgacacttcggtgggatttccgcgaagagtaattgcatcttgatcttcaaaactatcatagggatattcactagcaacatgacgaaccgcagactcactttgaatttgaacaaattgctcataatcatcaaccgaaaagagtgcttttgcggtatcgacaactttgtagacaataacggccgcaatttcgactggattacctttcgaatcattgacctttaaaatttgactattaaaattgcagacacgaagagaaacagtctccttatttgtaaatggtaccgtcataaataagcccgcatcacgaatagtcccaatataattaccaaaaaaagttaaaactttagcttcatttggctgaataattgtcaatgatgtactaaaaagaatcacaattaagaataaaataattccaattgtcaggactaccggaaaattacgcgtaaagccaacaaacatcagccacaaactaattaaaccgataataatcgccccgagtaacccgaggtagccgttaacgtgaaaggctgttttttctttcatctcgataatcctcctaatttaaaaacgtaaccccttgggataaaagtttttgattgttttaccgaccaactttccaaaaccagcagtatgtttgtcgcatactagtaaataccaaccattcggaaggtcagcatcaatattaattacatccccatggacatattggtgccactgttctctgtttaggtcaatgacccgttttgcctcctgtggtaagctagcaagggcccatgccaacgctggttcaaatcgatttttcttaaaagtaccgaggtgaagtccaggccgaagtacatttagtccctcgatcttgtcctcttctaatggcaaatcatagagctggtcaccaaataaaatcaattggtgtggttgatagtctggaaaaacgcttgtagcaaactggttaaagagtttgatctgttctttgtccggtttaacaatcgattgctttttccgcttattcttctttttgcgcttttcattagttgactctggcttaccatttactaacttagcaatgaaatgtccttcccccttgagatggtgcgggaataatcggactgtctttttcaactcttcattgccatcagcccattctggacgaccatcatccatccccactgccttttcaatcgggacgagttttaaatccggataatcaccaagcaaccatgaaatagtttgttcatcctcttctggtgcaaaagtacaggtcgaatagactaatgttcctcctggctttagcattttcattgcggatgctaggatcttctgctgacggttagcacactcagcagggtattctggtgaccaatattcaattccggcaggctcttttctaaacattccttctcccgaacaaggcgcgtcaacaagaatccggtcaaaatattgaggaaattgtttttctaaatctgcgggactctcactagtaacaactgcattttttgctccccatcgttccaggttttcagccaaaattttcgcccgtttagggaaaatttcattagcaactaatagtccctggttgttcattttagcgatgaggtgtgttgttttacctcccggagctgcacacaagtctagcactcgttctccagcttgtggattaaccacttctcctacaaacattgctgacggctcttgactatatacccatccagtaacatggtctaatgattttccattcacttgaccataatatcctgtcggcacatacggtacttttcccgtggctttttcaattgttgcaaccggctgtccgttctttaatggattctcgcgaaaaccactataacttgactgagcaagtgctgataaaaactcatcggcctctgctcccattagttttttgtatttcgtgacaaattcatttggtaattgcacgttatttttcgctcctctttactgtaatatctttattgtaacgtattttttagtctttttaagtcaaaatacttggcaaagcgttaagtttttgtttacaatattataattgaattttttatggaaagagaagtgagatagtaatggatcaacacttgattgcgcttgatcttgatggcacaacattaaataatcaatcgaaattaacaaacgagacaattataactttacgtgcccttgcccgggatggacatattgtcagcatcatcactggccgtccttaccgaattgccaaacatatttacgatgaaattgggattaaaactccgatggtaaactttaatggggccctaacgcatatacctcatgaacactgggataaagaatatgatgttgaattaacacgggagctagccctcgatcttctagcccaccggaaagaactaggaattaaaacaattaccgttgaaaataaacatcatgtatgggctaatcaagctagtaatgatttacccgaattcttaccgaacaagttgcgcgatgatcaaatcctaaccgcgactaacttaacaggcaatccaatcgcaatgacgatccaatatgaaccagaacaccaagaagaaatcattaaagcagttaatgaaaaatacggcgattttgttgaaccacgagtatggggtggcccttacaacatcttagaactgatccatcgtggcactcataaggagtcaggaatgttttatatcgctaagcagtaccaaattaaccggcaaaatattattgcttttggtgacgagcataatgatttagaaatgcttgatgcagctggacgtggcgttgcaatgcataatgccatttctgagcttaaaagtattgctaatgatgtgaccccaattgataacgagcataacgggctggcgaaatacttgcaagcttatttcaaagttacaatataaaaagctaggaagagatagtttaaaactaccaattcctagctttttacatagttattcctagtcaactagtttgccaacaacagggataccttcaaggactgattccagatggatagaacgaggcattactgaagttaaatcacgaccagcaaggtttccatggtgtttaccatccttccattgcggaacgttagagacatcgtaaacaacgcctttaacggcaacgtatgcaggatgtccatttcgaccatcgaactcagcgagttcggttgttgtaaatgttttttctgccatcaatgcttcacctttctctgattcaagaatagctaataattatattctagatcaaacaatccgtaaatgcattaattattagatgattattattttttcttcaatcaacttaataaaattgttaaaattggctttttgattgctcttcttgccttttccactcttttcataaaataatttatagataaaaagataatctttattacattaggacaaaaaattggtataataaaaggtgaaggtgattctgcaatcactttcgccaacatacttctactgtggatcattgatgttgtcatgtcatcaatgatcctcttttattttacagcattagttttattctgcaataaattttcacaattattccagccgtttattgaaactatttcagcaagtgtgaaaaataacttttggatcttgataattattagcaaaaagaagatactgaagaagagataactttaagaatgaaagcaggtttattgatgtatagagtacttgtggcggataattatcccatcattcgaatggcagttaaaaatctggttgaacaactagataattttaaagtaattgctgaagaaacaaccggaatagatgcctcattacgggttgaacaaggtgacattgatatcattattatggatttagcgataccacctggtgaaaatggtctgatcacaatcaaaagaattcatgaacatttccctaacaccaaaattattattttttcttctcgtaatgaacctcaatacatcaatcaggcaatttataatggcgcaaatagctatatctttaaaagctcctctccaaaagaactagttcatgccctaagacacgctattaatggtgaaaaatacttagacaataatattatggtaacgaagaaagatttattagttatcaaaggcggttctccgcacttcgatttaggaaattacgttgctctttcgaaacgtgagcaagaaatcttaccgttaatcgttctcggatatactaacaaagaaattgctactaagatgtttatatcccctaaaactgttgaagcccataagacaaagattatgcaaaaattaaaccttgcttcacacgcagaacttctccactatgcagttaaacatcaattagtagacctatagataatgggagtggaaaataatcttctcgacaaggcggtaggctaaggatagaacggtgattagcacggcacgggctgattatcgttcgtacttagcctcgagtcttatgattacgacgcggagctagcctatttggcttccacgttatcttactattgttcgcgaaaatcattgaggctgagagaaaacaaagttttctcccagcctcattattttcatttattactaattgtcttatcaaaattatttaaaagagcagctacttgaacttcaacaacattatttttattgaaccgcgcaaatacttctgcttcagttaaaagttgacgtatttttttcgagttttctcctaactcaattgtattatttgcttctagtaatttgattcgtggtaagaaataagtaacgtggttgctagcacagatctttgtcgtagcctccaacacttggttactaacttccaaccgcttgtttaatgaatgatactcggcagcgtagtacatcatcgttacaatccgtagataatagttccgatcaacacccgctaagtcttcatcagcctttgatcttaagaatgcaataacctttgagaaaaagaaatcagcatgttccattgaattttgtcgtgcatataagatccctgatcctaaatatgctaatggtgaaaagatcgtccgatgttgctcatccagttcatctaaaatcttagtaaagttaaaaagacttgtcgacgcgttattattagttaaagtgtaaatcatcccttttaaataataatattgcatccggtcttgtggcgattttaaatcttcaagccgaatcttcttaaggttactaactgcctgtggaaagtgttcaatcattaaagctaattcaatttggtctagcagactccggatataacgaattgaagacgtattatccttacttaaatcatcaatcgttaatcctagccgctcacaaagctgcgccaaaatcgtgagtgatggtacttgaccattgctttcaaacttgcttaaggtcgactgggtacaaatccccttgcttaaggcaacttgtgagtagccgagtctttttcgttgataaacaaagcgtttaatatccatgtctgacctcctatatctaaccgtgaattcctaatgcaattttagcaaacctactcattcttgacaaatcccagacaggttcccacacaaggttaatattacatttagttacaccttcaacagaagtaactgccttggtaatgtcgcgatttaagatgtcgcctaatggacagcccattgtcgttaaagtcattgtaaccgtacattcaccattattatcaactttaacatcataaataaggccaaggttaacgaggtcaattcccagttctgggtcaataacttcttccaacgcatccatcactttattttcaattggggaaaagggagtatccttttcgtcagccataagcgttcctccaaacttatttgttaattcaattaaccaattgaaccttccatctcaaaactgatcaaacggttcaattcaactgcatattccatcggtaattgtttcgtaaatggttccacaaagcccataataatcatttcagttgcctttgcttctgaaattcccctgctcataaggtagtaaagctgttcttcagagatcttagatacttttgcctcatgttccattgcgacatgagcattgtcaatttcattatatgggatcgtatctgaggatgattggtcatccataatgatcgtatcacattcaacgtgggctttagagccatcagagtgcttaccaaagcggaccgttccgcggtaatcagttgagccccccgtcttagcaatcgacttcgaaacaattgaactagatgtgtttttagcattgtggatcattcgggctcccgaatcttggtggattccgttgctggcaactgcgatggaaagcatggttccccgtgccccctcaccattaaggtagacgcttgggtacttcatcgtgacttttgagccaaggttcccatcgacccattccatggttgcgttttctgctgctgctgcccgttttgtttctagactataaacattatcagaccagttctgaatagttgtgtaacgacaataagcatccttgcagacgttaacttcaacaacggcagcatggagactatcagaagagtaattgggagcagtacatccttcaacataatcaacacttgccccttcatcaacaataatcaaggttcgctcaaattgtcctgagttttccgcattaagccggaagtaagattgaattggcgtctttgtcttaacgcccattggtacataaataaatgaaccgcccgaccatactgctgcatttagggctgcaaatttattatcagttggttgaactaatttaccaaaccatttcttaaataattctggatattcttttaaggctgtatctgtatcagtaaaaataatccccagcttttcaaactcatttttcatgttgtgataaacaacttcagattcatactgagctgaagaaccagcaaggtattttcgctctgcttccggaactcctaagcgatcaaaagtccgttttaaatcttcgggcacatcatcccagtcgcgaaactttttatccgtcatcttttggtagtaaagcatgttcttcaggtctaattctgataaatctggaccaaattttggcatcggtaattctttataaatcttgtaggctttaagccggtaatctagcatccatttaggttcatgcttagcagctgaaattttgcggacagtttcttctgttaaccctctcccagttgagtattccggctcaacgttatcgtgaaagccgtattcgtactggtcattattatttataatgctagctgcatcattactcattattttcttcctcctcgctatccttcaacagtgctcgttgtaatgcccaccatgagagcgtggcacactttattcgggctggaaattccataatactagtaagaatccgggcatcccctagttgatccaagtcagcttctgaatgttctttgccaattgccatatcagaaaaagtctttgccatcgcaagggcttcttcagttgtttttcctttaacagcatcggtcatcatgcttgctgatgcttgactaatagtacagccatcaccagtataggcaatatttttgatcttgttatcttctacttcgacttgaagattaatcgtatctccacaagtcggattatgaagggtcattgcattcgtagtagttgctaattctcccttattatgtggatgatcggcatggtcgagaatcacttcacggtataaaccacttaacttagatagtcccaatgttaaagaactcctttgtttccttgattgcgttaattaattgatcagcatcttctttagtattgtaaaaataaaaactggcacgagcggttgctgttactcccaagtcttccatgagtggctgcgcacaatggtgaccagcacggactgctaccccatccatatcaagggccgtggcaacatcatggggatggagacctttgatgttaaaggaaattaccccagtatgttttgctggcgattgcggaccataaacttcgacatctggaatagcaattaacttgggtaaaacataattaacaagttcctgttctttttgcacaatcctatccattccaataccatttaaataatcaatcgcggctccaagcccaactgccccggcaatattttgggttcccgcttcaaatttaaacgggatatcagcccatgtactctcattccggtgaacgtcattaatcatttctccaccgtattggtaaggagacatcgctcgtaataagttctcttttccgtacaaaaccccaattcccattggactcatcatcttatgaccagagaaagcgtaaaagtcaacatcaagatcttgtacatcgactggcatatggggaactgcttgtgctccatcaccaacaacgattgccccatgttggtgcgcaatcgttgctaattctttcaagggcgtcactgttcctaatacattactagcatgagctactgccacaatctttgtcttatcggtaattttctttttagcatctgcaagatcaagttcgccatctggagttaattcaatatatttcagggtagcacccttttccttagctaattgttgccaaggaataaggttactatggtgttccattattgaaataacaatctcatcaccaggttgaatattttgttcgccataggttgcagcgacgagattcaacccatccgtacatccctttgtaaagataatctcattagcactcgacgcgttaataaacttttgcactttttttcgcgcttcttcataatccttagttgcacgttctgctagggtatgaacccctcgatgaacatttgcattatcttgttcataaaagttaataagtgcctgaattacctgacgtgggcgctgaacagtcgcagcattatcaaggtaggctaagcgttcatcattaactcgctgattaagtgctggaaagtcggctaaataatcattcgtattgttgtccatcggcgagcttcctttcaagaatcgtaattaacttatttcgtacatccactgctgggattgcactcaagactgctcctaggaatcctcgaataaccattcgttctgcttgtgcgcgcggaattccccgactcattaagtaatacatttgttgttgatcaactgggccaacactagccgcatgtcctgcctcaacatcattttcgtcaattaacagaattgggttagcatctcctcgtgcttgatcggacataatcaatacccggttttgttgatcagcctttgcaccatgagcaccatgaataatttgcccaattccattaaaaatcaattcagacttttcaagaataacacctcgctggtttatcaatccggtagtatgcttgccatgattagtaacgcggttgttgacgccaacttcttggtcacgagtagttacggcaatcatctttgagttagcataacccccatcacctagcaattcggaatccatatcaccaactgtggcaccatcgttcatcaagccgactgcccattcaacgtgcgcatccttgccaatatcggcacgccgcttaaagtaagtatgggtatggggaccaaattcatctaaggaagaaaaatcaatctcactattttcctgcgccattaattcaatcatcatattagcggcattttcatgatcaccaacagttgtaaggtgttggataaacttaatgcggctgccacgatcggcaattactagaatatgcgaaattagaggctcatcttgagtactgtcctgaataatctcagcctcaattggcttttcaatttcaacgttttttggaatatagaggaataaaccggcattaaggtaggcaagatgataagcagttaataggttttcttcggggttaatagcagtcatgaagtacttattgaaaagttcaggatattcgcgcgcagcagtaaagatatctgtgagaataaccccctgatcttgaagtttttgtggcaagttaacgtggagcaaagtttgcccaaactgagttaccttaattacttcatcatcggtgactggtttttcaactaagtcggcgtctgcttcaacccatttcaatggccgctccgcaataaggggccaagttcgaaaatcgaaccgttgcatccgtggcaaacgaagcttttccattaactcccgagcactaagccggcgatcaatcaattgctgaggttcattatttgctttactagcagcaattatttgttcttttgctgagtttaattctgtcatcaaactgcctcctagtcttcatcatctacaagtttgatatcaagacctaattcgtcacgtaagccagcgtaaccttcatcttcaagtttcttggcaagatcaggaccaccagttttaacaattcgaccacccatcattacgtgaactgtatcaggaacgatgtagttcaaaagacgttgatagtgggtaataattaatgaaccaaagttgtcgccccgcattgaattaacaccctttgaaaccaccttaagggcatcaatatcaagtccagagtcaatctcatcaagaatcgcaaaactaggttcaatcattaaaagctgcaaaatctcattccgcttcttttcaccaccagagaatccttcattaagataacgttcagtcatggattgactcatatcaagcaattccaggttcttatcgagtttcttaataaagtccattaccgaaatttgatcatcttcaggacgacgagcattgatcgcagcccgaagaaactcagcattagtaaccccttgaatttcagcgggatattgcattgcaagaaagagaccttttcgtgctcgttcatcgaccggcatatcaacaatactctccccatcaagaaggatatcgccttttgtaacatgatagttaggatgacccatgatggtttgagaaagagtagacttaccagttccatttggtcccataattgcatggatttctccagtcttcatcttaaggttaacccctttaaggatctccttttcttctttgctttcttcatctttaactgaaacgtgaagatcctttatttctagtgttgccataaaattcatcctcctgacccgaaatattccaaaatattctcggtaaatattccataaatatcaacaaattctttacattcttattatatccgaataataaaaaaataaaactattcatctcaatttattttaagcgttttctcgatgaataatttgagtgtataataaagatataatatagtgtttatataattttagaatatttgataaggcaggtggcgataatgattcaacaaaattatattcttcactcatttgactgtttaaatacagccactgccgcccgattacatgatatgggcttgtgtgaagggtgtccgattaaagtagttcaaaaatatccttttcatggcccagtgataatcgaaaatgatcaccaacgaattggtttgcggtacactgtttttacgatgcttacgggggcagaataaaatgacaacagttgcactgattggaaaccctaatactggtaaaactaccctgtttaactcgctcactgataaatacgcctatgtcggtaattggacaggagtcacagttgaaaagaaacaaggaacgcttaagggaacagatattattatcatcgatttacctggcgtatattcactcgatcctttgacaaaagacgaagcagtggtaactaactacttaatgcataaccaacctaatatggtcttaaatattacgaatgctagtcagttaaaacgaaaccttttgctaacaatcgaggtattggaactcggctatcctgttgtattggttcttaacatgattgatgatctccgtcgatcagggtacgactatgatcttgacctgcttgaaaaaaggctgggttgtaaagtaatgacaacaaatgcgcgtggacatcaagggattgatcaattacgaaaagaaactatcaattgtaattcgctccaccctacccaactagatttagattatccccgatgatcaagcaagcaatcaggcaggcaagtacagcgttggaaagtgattattcttttgcgccccaggttgcgcgttggttagcgattcaattcataagtaagaataaagtaattcgtaaatttgcccgggaaaaagagctaactccccttctttcgcaacaaaaatattatgacgcgcaaaagttcgctgaccaaatttttgaagtccggctacagtttattgaggacactctcaaccaggcccgtcatccacttaacaatggtgggcaagttgagataacaagtcgaatcgacaaaatcgttaccaacccgattcttggcttaccaattttcgtcctaattttctttgtaatgtttaagatgtcctttgattgggttggcaccccactttccgatatgcttgatcagtttatatcaggcccagtttcaactactaccgaccaaaccctcgctagtctaggggcaattcctgcattacggtcgttagtcgttaacggcattattgccggggttggtggagttttagcctttattccacaaatcttcatgctctttgcctgcatttccctgcttgaggactctggttatatggcgcgggcagcgttagtaacggaccgggttatgcagatgattggtttaaatggtaagtcttttattccattaattattggttttggttgtaacgttacgggaatcatggctgcgcgaacaattgaacagcctaaagaacgactgatcactaccttaatcatgccgtttatgagttgttcagcccgcctaccgatttatagcttattcgttgccgccttcttcccacgtcaccaagcactgattgttttatcagtctacttcttaggaattgtcgtggctttagcaatggcaaaattctatcaagtaatctttaaggtaaaagaaagctcagtgtttgtagttgaacttcctcactatcatcttccccgtcttgatataatttggcacggaacatgggataagggtaaaggatttattaaaaaggctgggacaattatttttgctggaactgttttaatctggatattatcaagttttggtcctagtggttttgttactaattcggctaatagttttgctgccgaccttggacacatccttgttccgatctttaagccaattggtattgaccagtggcagccaattagtgctttgtttacagggatccttgccaaagaggttattacttctagtatgatggtaatgttccatacaagcagtaaagcattcctcatcgcttcacttggtcagtttatgactccgctttctgcttatacgttattagtctttattctcttatatgcaccatgtttcgcaacgttagcaactatcaaacaagaaactggttctacaaagtggatgctttattctgttgcatccagtttagtcgttgcgtacgggcttgcatttattatctttcaggttggtcgattatttattgggtgatttaaaatgaaattaattattaacgttattattattgctgcaattattgcgttagccttttacctccttgttaagacttttcaacgaggcaagcaagggaaatgtgcagcttgtgactacgattgtgaaattaaaaagctggcaaagaataaaaagtaattataaaatatggagacgtgtggttagtttccacgttatcttgctattgttcgtgaaaacgaggctgagagaaaacaaaagttttctcccagcctcgtttttttactcattattcaatttttctcgtaacataaaccggcgaatcttaccactcgcgttttttggcaattctgaaacaaaaatatagtgttgaggaactttatatcgcgccagatgttcataaccataatttattagcttagttggagaaagacgacgatcactgacgacaaaggcaactggtacttggccccagacagaatcattttgaccaacgactgcaacttcattaatctgtgggtaacgttggtagatctgctcaacttcttggggaaaatattttctccaccagagatcaacatttcatctgcgcgaccatcgatatagagatatccttctttgtccaggtgaccgatatctcctgtccggtaccacccgtcaatcattttagaaggcaacttatcaggcaggttaagatagcccggagttaaagctggtgttttcagcagaatttcaccatctttactaagttttagttgggttgagaatagtggctgcccaactgatcctaattttaggagtgcatcagctgaccgtaatgcaacaatttgggaacatgtttccgtcattccatagcattgaacaacaggaattgaccgttgcaaacatgcttcgagcgtttctcgatcaatcgttccgcccccaagtaacatacaacgaaatgctgaattatagtgcgtattagtcttattttgctgctgaatgagctttttcagcataaaaggcacaaccgacataatggtgaccgtttcatttgctaaaattcgttcaagttcttcagcacggaacttctcaaccaagcgaacagtcatcccgtaaattaatccccgcataataatcgaaaaaccactaatatgaaagatcggcgctacacacaaccacttatctgcggatgataaacctaaattcaatgcagaagagactgctgaataaaaatggttgccaaaagtttgcaaaactcctttaggcctaccagtcgtcccagaagtatacataatgctggctacccagtttgatttaaatactggaattagctctcctggatcagcacttgttatcaagaacgcactgtaagacttaaaaggatccgtcatccctgatcgccagagagaattttcaaccaaacacaactgaagtccactatctttaatctgtcgttcaagctcttcaccagcaagccgcaagttcaaccagacaatcgtgcggccactacacatgatcgctagtgataatttatagctcatcagagtattagtagctaggatgcctacccgcgaaccaggattaagatggtcaatttttccaacaagtacctctacctgtttttttaattcagcaaatgataggcgttcattaccatcgtcaatcgcaatctggttcggctgagttgctgcttgctttaatagccagttttgtgtttccatttaaattgcctcttttatttatgggaatttagggaactggtcaaaattagggtcccgtttttcgttaaaggcatcccgcccttctttaccttcatcagtggtgtagaagagcatcgtcgcatcaccaccgagctgttggaggccagccagtccatcagtatcagcattcatggcagccttaataaaccgtaatgccgttggtgacttcttcaagatttcgttacaccagtccaaggtaaccgattcaacttggtctaatggcacaactttattaatccagttcatctggtaggcttcatcggcactatagaagtgatttaagaaccagacttcctttgcccgtttatgaccaattacgcgggcaagataaccagatccatagccagcatcaaaacttccgaccttaggaccagtttgaccaaatttagcattgtcagcagcaatcgttaaatcacaaacaagttgcaagatatttccgccaccaactgaccaaccttttaccatcgcaatgactggtttagggataatccggattaaatgctgcaaatcaaggacattgagacgggcaatcttatctggaccaacgtatccaccattaccacgaactccttggtcaccaccagatgagaaagccttatcaccagcaccagttaggataatcaccccaattgtgctatcatcacgacagatggtaaacgcgtcgatcatttcttgaattgtaacgggggtaaaggcgttcatcttttctggacgattcattgtaatttttgcaatctttcccgctcgttcaaaaataatttcagaataatctttaaccggttgccaatcaactgttgtcataactactctactccttttgtgaggtcaataataatgaacctattagaaaatttagatattcaaactcaatcagtcacagccaacaagtgcgttatcactgttaaagtaagtgataagctcaagcaaccttatggaatcgttcatggtggaataaattcagtcctcgctgaaaccgcagcttccttaggtgccaatcaatggttagctgatcgtcaacaagatcaaatagctctcggtgttaatattaccacagagcacctcattgcggtatcgaatggtaaattaagagcaattgcaattccgattaaacgtggccggcgaatccaaacctggcaagtcgatatccattgcaatgatcaatgtactagtaccagtatagttactttgatcaatcaaccccggtcttaatcttctgatcatttctttaattattattcgaaaataaaattatttagaattataaaaaatggttattcatctttactactatcttttctcgccttaacgttcgattaatcgttctgattatacaaattccgttattgttctaaaataagacatttgataaattaataccaacgcgaggcgaactgcgtgataaaattaaaccgttttatcttgcctgaattaaggaatgaatcccttcttttaggtcgtcagtttacctatttggggagaagaaaaataaataggacaaacactatgatgggaagcatgtcgcgtaaattatagttttaaaggagagcatttttgatatgcgcttcaatgaaaaagatgaagaaaagtaccttaagctgattaacaatacccgtcgcggaagcaataaagacttcgaagagttatttcgccgttattggccgctcgttcgccgactgtggcaacgatataatattagcggccttgaattggcagattgggaacaggaagcccgtgttgtgatgctagaagttattcgtttatacaataatcaaggtccgcgcatgtttagctgcttttttaaggaatgcttaactaaccggattcgtgatattcaacgacaaactcaggctcacaaacggatcccagcaggctgtctttacgcattaagcgatgattttgctgaaacacttaccgactttttacatcattcccctgatgacattatttattgccggcagagtcttgaccgtttactttgccgctgttctacatttgaacgaaaagtattagtttatctccatactggttattcgataactgagattgctggtacccttgattgctctaaacggagcgtccaaagtgccttgcatcgttgccacggcaagctattaaaagtattaatgaagtaaggacttataaagcaaaaataaggtgctgagagaaagctttttattttctcccaacaccttattttttatgctttcctaataaacaaacatgcaatcactgcaactaatgcactgataacaaggccgaagaaagcagctgaatatgagccggctgcttggacaatccacccaattaagagtggaccaacaaaaccaccgagttgcccaccaaagttaacaatcccaattgatgatccataagttttctccgataaaatctgtgcaatgaaactaaagataccggtaaatgccaatgatttaacgaaatagatcaagacatcaaagatcacaacgcctactaatgaagttgacttaaagagaccaaacatgaaaaccagagtcaggaatgaagcaatactaatcatcctccgttcatgcttcttaaacaaatgcaccatcacaaagccagaaataaatgctgcaatacctccagaaataactggcagtggtactaaccaggccaagttcttcaagttaattccctgttcttgcaagaaataaactggcatccaggtttcaagtcccttagtaatgatattcagcgcaagtccaattactacaaaggcccagacacggtggtcaatctttttccattcaatcttggaacgcgcctgcccattttcttggctgctattaattggccgttctaccaggtaataggtaagtaaaataataaacccaccaaccccaagcaaaacaaaggcatttcgccaaccactgctagcaataattggcacaataattagtggcgctactgctgccccggcataattcgatgaaattaaagcagaagttgcttgtgatttctcactcttatcataattttcagaaattcgttttaatgccgctgctggatatggcccttctgcaatcccaaacagaaaccgaatcgcaatcaaggcagcaagggaccacgcccagccagtcaccattgtcatcaacgaccaggcaaacaaggaaataattaccatcagtttactgccaaacttatcagttaagtatcctccaggtatctgcatcaaagtataccctaagaagaacgcactggcggttgcccctaacgctgccgccccaacatgaaagtctttaccgatgtaagcaagggaaatattcatcactgtgcggtcagcaaataaaatcatatatcctaaatatagtagcagaaaagatccccatcgttttgctactgtaaagttacctatattttccataaaattacccctttaatataaagatctttttattgtaattgatcattttagaacttaccacccaaatcctaagaatatccgctaaaattaagaacgtcactcttaatatttttttgttaaaatattagagatatcctaaaaaatgattgttaatccaaggaggaattatggatttctcatttaaaaaacgaccggtaaaaagactatatggtgaatatactattttattcatctttttagccttatgtattttcgggacatacttaattactggtcatacttttatccttagcaaagatgctctcaatcagcatttacctttactagcaaagtatcgagaagcactgattagcttcttccaccatcctcgcctaaacttctggtcatggcaaatggggctaggcagtgatacctttcaagtatattcttactatacgattggagacgttttctcttaccttgtactactttttcccgcagcaaagattaccctcgcctaccaggtaattaatattatccggatgtattgtgttggcctcgcttttgtctacttcgcgcaacactttaaatttcggaatagcgtcattttgatgggggcaacaacctacctggtcaattcgtttttactctatgcctgtatcgcccagccgttctttaccacgccatttattatctttcctttaatcgtggtccagattgaacggatattgcaagaaggctcgccctggccgcttgctggtgcctttacatggatgctagtaagcaactattaccttgcttacgttttaggaattggttcatttctctatcttgtccttcgcgtaggaacgcattatcgtcgcacgcttaattatgggaaagccttgcttaaacttgcctttgcgacaattactagtgtcctcttatccgcggtcttgctcgtcccagaaattatcgcggtcacaaattcaacccggactggatcattatttgctaatggtttaaaaacctatcctctttactactatctctttttgcctaagtcactgattaacggtggtcaatggtatttcatgttctggtctgcgctagggattgtttcaattggttttatcgcccttgtttacatttattctcgtccccgaaagtatcccctgctaacgattagccttggtctttccttaatcatgctgctaattccagcagtcggcgctttcttcaacggaatgatgtcagcttctaaccgttggacgctcttgatctaccttccattagcaatggccgtctgtattctagcagagaacattccaacgcttgatcaaaagacaatggcggtcctaagttgggcaacagggatttacctcattgtcttgattgcaaccttcttctttgacaatgagaatgatatttttatgccggttattttcttaattggctccctaatggtcatctggttgattcacttaaataaacttactcatccttaccggtggttactagcgattacaatgcttaacgctggggtgaacgcaatttacgcggctttcccctataacggagatttctctagtagtatgctgagccggggagagtatcaagcaattactagcaaccgttacggtaaccttgatcaggatttgaagaataattctttttaccgcgtttcaacaattagccaaaataagattattgacggcccgaaccttgataacgaccttacttctggattgcataacattgattcttactattcactgcaaaataaatatttgggacagtttaatacaagcctacaaaataaccagtatcaggctaatatccccattcggcaagccgatgatcggacaattatgaacaatttctttggcgtcaaatatctctttgttcaaagcaatggtgataacgcgacaaagattcccgctggttactttttagataaagcaactgatccagtcatcaattatgatgaaggacagccaagcaatcccaaaagcaaagatgagtttgtgcccacgcaaacaatgcggtacaaaacgaactatgctttcccattactttactggcaagataattacattagtaaaaaagattatcaatcactctcaccaactgaaaaagaacgcgttttagctaccggtgttctggttgataagcaagaaaagcttcgaggaatgaaggccgctaatctcaagacgcatgtctatccccttaaaagcgagttagtttctaaccgcttgaataaggttaacccggctaagctgacctataccgatagtgaagaaacttatcaattgcaattatcagaactgcaaagtaaaaaaatgcagcaaaaattaaagggcagcgagttgcatattgaattttctaagattaagtacactcctttctccatgaaagaacagattgcctatgagcaagcacatctgaaggaaacggtccttaatcccggaaatgttattaatcagcgctatacccactatcgctattggcgttaccacgttttaaatggttcacctgatattagctttaagcttaatgtcggcagtaagtttggaactgctacgattgaacaggcgcggcaaagtaccctttctttatttaaacacgttactaattcgacgcttaatattggttattatgatggcaaactgccaacttcactcaccttccagccttcaaagctgggaacttataagctcaaataccgggtagtagcagaaaaactagataataattattatcgtgaagttaaaacattgcaacgccatcgtctagaggacgttaaattcaaacgcaaccaagttcagggaacgattaaaactactcgtcctggcgtcctcacctcttcgattccttattctactggttggtcagtgaaagttaatgggaaaaagacaactaccttacgaacaaaccaggctttcctaggagtatacttacctgccggaactcatcatgttacctttagctatgagttgccaggaatcaaattaggcgtattactcagcttgattggcctaggctggaccattcttaccggaatcattacgatcgtatgggaacggaagcgcaagtaaagcagaataattcttgcatcccttttaagagacgcttaagataaaattaaatctatgggcaggagaaaaaatcgtgcataagaagtttacctatattgtctaccaaattattatggctatcttagccgttatctcgattggaatgctgatcgcatattatgctaagcggatcaatattgatgcctacccttacaatatgattgacaatgggatttggttggccttctttactgattacgttatccgcctgattatttcaccaaataaacgcgaatttgttaaagataacatctttgaccttctatcaatcattcctgccagcagcctcttctttctcttccgaattggacaaattggtagaacctttcagatgcttaaactcatgcgcattatgcgtttagtcggatttaccggtcgtttaggcgtcttctttgagcgcaatgagttgctctactacttgtacattacgattgctgttataatggtagccgctgcaatgttttgcatctcggagaaagtctcttacgaaacagccctgtggtgggcaattacaactgctactacgattggttacggggatgtgattcctaagaccggaattggccgggcagccgcgattgtcttgatgctcttgggaattggttttattgggatgcttaccagtacgattactgagttctttgccaaaaaagacgaacggaagatttctgcacaattagtcaaaattcaacatgaaaatcgccaactaaaggctgagctagacgaaatcaagcgtttgattaagaaaaataaacgttagcaaataacctccattcaaggatttatccaagaatggaggttatttttaatttatttgtcgatttaacgaaatcatctctagtaagctttgtgcagtgatcgctccttcattacccgctttgagtcccgcgcgttgcattgcctgttcaatgttatcggtagtaaggatgccaaatgtaattggaatattgctcgttaagttaagattcattacgccgccagcaacattttgacaaattaaatcgtagtgatctgtttcacctttgataatagcgcctaacgtcaaaatgccgtcatattccttttttgtcaataattgttttgtcataaacggaatttcaaatgctcccggcacatggtatacatcaacgttttcaaggtcaaacttagctaacatttcggtagctccctgcactaattgtttagtgacagtttcgttaaaatcagcaacaacaatcccgatttttgcactttgaacattaaattttccagtaaattctttcatgattaagcctccagattcagtaagtgatgaaatttatttttctttgtgattaagtaattctcatcgtagttattaggtgcgatttctaatggtatccgttcattgatttcaatatcgccaagttgtaattgcgcaattttatcgggattattagtaagtaggttaatcttggttatccctaattgatgtaaaatcgcaactgcttggtcatactgccgttcatcaggcgcaaaactaatttttcattggcttcgacatcatagtcgtgctcttgtaaagtaagctcgcaacttatttgctaaaccaattccacgaccttcttgacgcaaataaataataaccccgttgccgtttttctcaattcggcgcattgcttcatgaagttgaggaccacaatcacagcgaagggaaccaacatcgccagtaaagcattctgaatgcaagcgaaccattacaggagtagttggatcaatatctcccttattagcgctagattattgccatcaaaccacgtaagcgaaagtcaccatactgagacgggaggtgcacctctgctactggtttgctcgctagactttgccggtattcctgaagttctttgatcgtaatgatgggtaagctaaattcggctgctttctcatggagttcaactgatcgtgccatttcaccattgtcttttaaaatctcacagatataagcaactggttccaccccagctaagcgcgcaaggtcaacagcagcttcagtatgtccatttcgttctaatactccatttttctttgcaactaaaggaaagatatgacctggtttgtagaagtcttcgtttttagcagtcggtgcggcaagatgagtaatagtgcgccaacgatcaaaagctgaaattcccgttgttgtcgaatgatggtcaacgctgatcgtaaaagccgtaccaaaaggatctgaattatcagcagtcatctgaggtaatttcaatcgttcagctacttccggtgccatgggaacacacatcaatccacgggcatacttagtcatgaaattaaccttttcgggagtagcttcactagcaagccccaccaaatcgccttctgcttcgcggtctgcatcatccatgacaattgctaaacccccttcttgcaaatgcttaatcgttgcttgaattttctttacatccattattttcggcctcctagtaaatttgcgactacatatttgcctaaaatatcggtttctagattaacttcatcccctactttaagcgtatctaagttagtcacgagttgagtgtgcggaatcagcccaaccgtaaaccagtcatcaccagtttccatcactgttaaacttacgccattaatcgcgacacttccttgcgctaccacttgaccatgcaggcgttgcggaagactaaattgcacttcaatagcattttcattgacagtccgcttaaaactcgtgatagttcgtcaacatgccccgttacaatatgaccttctagccgtgcgccgatttgcaatgaacgttcaagatttaccagggaccctttttccaagtttttgaacgttgtcttttcaaaggtttgtgacattaatgtcgtcgtaaattgattgttgttgatttctacgaccgttaaacatgtcccatttaccgcaattgaatcgccaagttgcacggtggttaaaaaatcatcactatgaggttcaaccaccaattcaatcgtttcgccatcttgggtaatttttactattcgtcccgtttccgcaactaaaccactaaacattttcaatcttcctttccgcaatcctaatattattttctaagattttaatttcctgatgggtaaaattcattgggcaagctagttccatgccgctaacaccttttttgccaagcatgtggggagctacgtatgtaataagctcttcaaataagccttcctgtaaaaaggcttgatggacagtcggacccccttccacataaacagattgaatttctcgacaaccaagttcatgcaagatgtcgttaattgaccacgtccggcgataaaacacccgaatgcctttagcaaactgatcttgtagcgaactattttccgtaaaaatccaagtaggtgcctgcccttcagtcaacaagtgtaaggttggattatcttttaaacgtccccggcggtcaagaacaatccttactggcggaaactttgtcggactagtcgttaataaagttggattatcgataattgcggtttggcttccaatcaagattccttgaaaattaccacgctcggtatgaaccatttttgccacagcagaattagtaatcgccgttcgttgacctttttctgcggccacgcgatagtcaagactcactgcttgttttaaagttacccatggtcgtcggtaccgatagaagaaatcgtaatgcggatttaagacctgtgctgcttccttaaggacgcccgttttgacagtaatattttgctgttgaagcgtagtaatccctttcccggtgacaagctggtgcgggtctgtttccgcgatcacaaccctcctgatacccgcgtcaataatcgcctgactacatggtggttgtttcccatagtgattgcagggttccaacgtgacataaagagttgctccctgtaactgtttcggcgtaagtttacctattgcatcccgttcagcgtgaattccaccgtattcgtgagtatgacctcgcgctaaaacttgaccatttttcacaacaactgccccaacgcgaggatttttccaagtttcattgccagcctttgctgcttcagcgattgccatttgcatgaaataaacatcttccactctaaccatcctttccaaaataaaaacgccctaagatttctctcgggacgttaaatagttaacttaaaaaacagctcggtaaaaataaaaccggataacatcactgctatccggggctttacgtttaaactgattgtgtcatttttagttttcttctcccatccagactatactgtcggtaccagattttcactggttcaaccgttaacataaatgctaacgggtcacggactccaagcgtacttgttaccgtcggttgggaatttcaccctgcccgaagaaaattagattgttaaatttacatatagtgtaactcttcactttctttttgtaaacagcaaatttatttctgtgagaaactttgcagggtatccatgatcaattggatgaatttctcacgatcaatatcaaggaggactttagtattttggggcttatcagttaactgatagtagtcacaaaccgtctctccccgtgtaagatcgccctgagtttcaacatccacattcattttgtcagtaccgaacatagtaggatcaatcaaccaagcaatcgtacatgggtcatggaggggtgcacctttaaaaccccattttggattttcatggtactgttcaaagaagtttaggagaccgtagaaggcttgagcgacaggattatcgatctgcccaatttgctcaatctcatctttcataatctgcgctttatgggtcacgttcaacggtgccattaccagaggcaggccgaagttcattacaatcttagctgcttctggatcaacaaaaatattaaattcaactgatggtcgccaattgccaagtcccattgccccacccatgaagacaatttgatcaatcttttcttttgccaagtcgggatagactcgcaagaataaggctgcatttgtcattggaccggtgacaactagagtgactttctcatcacttttacgaagagttttagcgatcaattcaatagccggaattggttgaactttgaaatcgggatcaggaaggtccgcaccatctaaacccgtctcaccatgaacttctggtgcagtttcaagcggctcaaccagcggagtttgattcccctgagcaactggaatatcttcacgatggagtaaagttaacatccgcatcgcattatttaaggttttgtccggtgtttggttaccagcagaagttgttacggcaaggacatcaatcttcggtgaagcaatggccatcgttaacgccaatgcatcatcatgtccgggatcgcagtcaaggattatctttttggtcatttgttatcggcatcctttctttgtgaattgttagtatagcggttacattaattataacaaatgaacattattctgtttaatgtcgatcaataaaatttaaaaagacataataaaaggaccacctaatcgtgatccttttcaatataagttataattttacgctttctttactaaataaattggtaaagcaatcgcgccagctaaaagggctaaaatagtaaacttcttctttgaatgcttcttaggttgtgtagttttatttttcttcataagaatctactcctttgttcaaaaacctatcactacctacactcttattttagccccattttgcctttacgtaaaaatatatgggccaggtaattaaagcaattataaataaccaaacaattatcttttgaaataggttaagtttccaaatatgtttcataggttcaccttatttctttttaagccagctaaatatcccatggcggtgcgcttgcttttcttgtgcctctgttaaccgggtaagcaattcagtcacctttgcatcagtatttaccttttgagcgtcccgagctacctcgctgctattatacttttgctgaagggtatcactgttaagccaccgatcaaaattagcaacatcgacaataaaaccggtactagtatattgataactaatccgatactttcgcggcaagtattggaagtaccgttccatcatcattgaaccattatttcgcgccgtactatctgaaaccttattaaaaagctgcttattaatttgcgcttttaactgaccatcctgctgaataaacgttagatcagcacccacttccgcctggttaatcagcattgtccaatcatttcgcccgacaaagagtgagtaatcataattatcatcaaagtagtctttaacaagctcaaacatcccaaattggtccatcgcttgtttcaagacatatttgatgggataaaggtaatccttctcaatcttttgttctgtctctggtgacacatcattgaagaattttgcgagttcaacttggcaataacgataaagctgatcgttagcgcgctcaagcaagtcatttaatttagcttcacgttcatcctcatccccggcaaaagttgattcaaagctgaggtaccataaacgacgcataatttccggtttaagggaaaattgcgatttactatcaccctcacgacgattcatcgtaaaaataaatgatgggagtggctgagttaaactacgattgttagtaatttctttaatgaagcgatcaaaatatggccgtgttgttaagtcggggctaatatcatcaatcatcattggattaacgggcccggcactatacatataatcgcttaagacggttgtaatagtcatattgatattggactttcctaatgcataatttttagcatcaaaaacaccgccatcaaggaaattgccactccccgttagcttggctgctagccgctttcccaaggtcgacttccctgttcgtccttgaccaatcaaggctactccaaggggtacatcttcgcgcgatttactacttggcgataattcatacatattccggattttccatagccaaggcgcctcaaataggaaacacatgaaatcacatgcctgccacccctcaccgacttctttgtaattatcgtactcatgggcaatatcactaaataattgcagctgttcacggagccggtcacccgttaaattcgatgttattaattctgactttacattatcaccaacacggggcgcttcaaataactgaccattgttataaaacaagactggtttagggtagaggtcttcttcacgggtaacctttcctgagttatcatcgtttcgagacacatgtttaactacctgggtaaggctgtagagttctttccctatattttcgagattgcgtttcttatagccagcattaccaaagagcttgacagtttgggcgacactcaatttttctggagctgatagtttctttaattcctcgtcagaactatactgatccttatattcttttacttcttctgccgggataatcaccgcatccttgtcaccggtatccttgtttttcaccatattcaccgtatcggtatagacattaatctgaagctgctctttatttttcgccttaatgaacccggccattttctttgcgtccagataggtagtcgcatggcgaaggttatcgttgaacatctggacatggcattgataaagcggatccgtctgcattccatagtcactgtcaagttgttctaaattatgatgaattgctgcttcggttaaattcatcgaaccggcaaatgaaagataccggtcgtcacttgtcattaagtacattttggtatgaattaattcttgcttagtgaataaaagttgcaagctaccatctaaaattcgcttcgtaaattcactatcagggtgttcataaccataattgacaaattcagtccggtcatttaactgcctcatccgtttgccaattgattctttcccattgtcgcttaagccgaggatcaaagtgaccttatcatagcgcggtaatagttgctcctcaataaacttaattgaagaaacaaatgaaacgcccctaaattcggttggcttttcaagatgctcacccgcgaattgccaaaaatcggcatcagaaatcaattcttgtttagtgtaatctaggatatctaacatgtgactcgcctcctttttagttaactttcaaattatatcatgaaaaaaagaaccactcgcaagtgattcttcggataaaaattagttcttctttgccagcttatatagtaagtacattggccaaattaaggctcctgcgacaagtgttaataaaacaatcttttggttctttgacaagttatgacatggacacttcatatttaatcgcctctttgttgatcagttaagttaattataacgcatttgggcgataatttaaggaagcgatttcagatttaaagaagatttagtatcttaaaacatattaccatcaattttatatgtcatataatgttcttttacttctactccaacttgatactgaatcattaaattagttaacatctcgccgttaaccagtgtaatatttaagtcctttgctgcgttgattgcaccttgagtaaatgtagaagttgtaataaatacacctctatctgcatgcttgagcttaattgaaccactaaatgctgtaatttctggcatttgaactgaattatctggcgcatatctttttacttgaagataaactttttgcaaacctagtgggtcttgattaataattccatcaattccatgatcatttgatttctgtgttactaaagcctgcccttcatcacccttgtaccccattacagataacaactgaaccattaagttttcaaatttatatggattcatttttaccaagtgatttaataattcatcctgcgttttttcgtcttgctgattaaaccattccttaacttgactttcagctaaatctttattttctcgcttctgtctatttttcttttgattacttttttcttgtttgtatttcttataagctggctcattatggatcaaagttctcgttatattaattccatattctttactaagctcttgcccgcgacgagtcgggagataaaggcctctcttgggtcggtttaataaacctgaaattgctaaatcacttaaagcaaaactaactcgattacgcatgaccaaatcatgactcttttgtggataacgcatgtcaacaccgattttaaaatgtaggatttcaccggtttaaaaatgtagtttttcaccgatttgtttctgttgtctgttgttcttgatagtctttcattcgatatgattttccagtaattttgaatatttcagaatggtgaactaagcgatctaagatcgcattcgcaattgttggattagagaatgtttgaccccacttggatagtggaatattagtggtaatgattgttgatttcttttcatatcgacgagctattaactggaagaaaagatctgatcccaaatcgtcaataggtagatagcctatttcatcaataatcaaaagcttataacgactgtagttttttaatattgcctcaagacgattttcttggtgggcaagtttgagccgttcaattagttcatgacaattgacaaaataagtactgagatgattcctacaggcctccattcctaatccagttgctaagtgcgttttgccaactcctgaagacccgatgaataagatattttgtgctaacgaaacaaaattcatcgattttaagttcatgatacggtttttatcaaccgaaggttgaaagttaaagtcaaaatcattcaagcctttgtcgtaaggaaagtgtgcaatatgaatggacattttagctgatcgttcagttcgatatgtgatttcttttgcagttagctgttctagagcttctgctaatgataaatcattattattcaagtaatttggcaaatattctttgattgcagtcagcttgagcttttctaaattgtcttctaattgtgtatagatagtcatccgtcattcctccactataattgatcaaacatgcgtaaatttatttctacctgttctgccaatttatcgtcatctaagtcatgaaaaatagttgtcccaaggatttccttcatatcatcgcgatgataatttagttttttattactcaggtaatgttgtcgaaccaatcgtgaggcatgataaatcattaatttttggtctgtaaccttgacgttaactgtttgcccgatatactttacaggtacagaatatttattgcctagataggtgatcatcgattcattactaactttgcgggttagatcgtgatcaactaatgaattcaaaaggattggattgtatggctgtaaatattctttttcttttatccataaatcttctggtctttgatcagttgcttagcttatttcgtgattgagctgtgtttcaagctgcttcacgatattttttaacgccttctcatcctgaaattcgtgattataaactttaatacggtctacggttctcgctaaggcttcgacttttcctttggtttggggacggaagggccgacaggcttggggaataaagcctgcggctttagagaaattcaataagcgtgaattccaaataacttttcgatagctactcttggcgtgatcaaccgccgttttcatattatcgaaataaattctttgaggaacaccgccagtattttgaaaagcctcaatcaaacattgaaatagtgtgtcttgtttacggtcaaaaactaactttaagaattttttgcgtgaataacccaatacatacagaaatagtgaaaaagtaatggggcggttttctctggtatataagactaagtcttctttccaatcaacctgacttacatcaccaggtgcagtttcaactctaatcactggctgctggtattgtgcttttttcaactggtgacagtaatcacgcaaaattgaaattccgccttcgtagcctaattctttaatgaaatagaaaatggctgttgcagaacaggttttgtatttatccttgataacatcacggtatgggtccaacttacttgggcaacgcttgttagtttgtcgtttaccggcttgtggattatttaaataccgcttaattgtcctagggtcgcaattatattgacggcctagggccgcataattaggtttaatttttgccattttgtaaaatattaactcctcttgtaattctagtcgcatcaaatcacctcaaaagatttaatgcaattagtataaaaaattgtaggaaaatcgacattttcaaatcggtgttttcctacattttagaaccggtgttaacataacgcatttgcaacatgctttgcggtaaattagcttcttctaaagttctttgtatcaattcactgctttgccaattctgtctttcaacggcaacttttaaaataactcctaaaaatgcatcccaagtcggagtaccatcggcttgatgttttaacgttgtatagtcaatcattttcagctcctaaaattcacttcaaatcgaagtaataatcatccaaagcatacgtattaactggcgtaatatgtaattgatatttttcaaccaattcagctagtgtctgcccgtcaattaatgttacagtattatttccttgggttgccttttttcgagcacgatctgtgaaatgattagttgtgataaatatcccatattcagcattaaaactatccattactcctttaaacttatcgatttcaggttctgatactgctccttttgtgtaccttttacattgaatcgctacccgactagttctgaattcatcagatgtaaaatatccaaagccatcgattccatggtcaccggaacgaacaattccgcgatctttatcaattacaacacccatttttgaaatcaataagcgcgaaaaactttcaaatttactaggatcaaacttcattaattgagtaatcaattggtttttccagtttaaatctttagtatcctcttggtcttctggtcctgttgattcgtctccgctttcttcacttactttatttttattacgttcagcacgttccttatttttcttatcccaataagcaccaatttcttttttctgttctaacgaaggataatttgttaaatcatcgttctctccggccttagtaagaacaatatcctgattacgatgaggagcttcaatatattgaatactgcgcaaatttcgaataccaaagttaaagtcaaacaagaatggtgaataagtgcccgttttaccttctttagttgaatagacttgatcataagttaatccatcatattcattatctgcaattgctttccaaatagattttcggcttgctgacccacccaaatctcttaatgccataataattgctttttctactgatcttctcttatattctgccatgatttcacccattaaatatatattctaaatacttattatatcgtaactttttaccagctatttctcagtattatcaataatttttataaaagtatgtattaatgttaaatgggagcagcgtaagttgggggagactcttactgggtttgaatatggtcttaatacacctgcaactgactacgatggtataaataagtatttgcgtattactgacattgacgatgtatctcataaattcgatatatcacatttaacttctcctaaattaaaagatgataattatcttttagccaatggtgatattctatttgcacgaactggtgctagtgttggtaaaagttacaggtacagtaatatcgacggtaaagtgtactatgctggttttttaatcaaagctcacattaaagaccacttttctactaattttatttttgatacaacacttctacctcgatatcattattttgttcaagtaacttctatgagatctgggcagcctggaatcaatgcaaaagaatatcaaaaatatataatttatacccctcggagaacgaacaaaacaagattagcgatttaatactaactattcaaaaattaattgatctccagcaacgaaaattggaacaacttaaacagctaaaaaaggcgctgttacaacaattatttgttgaaaaaaatagtaaacatccaattttaagatttaaaaactttaatggtgattgggaagagcgcaaattaagtgatattgcaaattatagaaacggaaaagctcatgagcaatatattgatatgaatggaatctatactgttgtaaattcaaaattcatttcaacaaatggtaaagtaaagaaattttcaaatgagccaatcgaactcttaaaaaaaggtgagatcgcttttgttttatctgatgtaccgaacggaaaagctctagcaaaggcctacttgatagatagtgataataaatacagtttaaatcagagaattgcaggaatttctcctagttccgatataaatagctattttctatatgtattaatgaacaggaatcgatactttttgaagttcgatgatggtgtaggtcaaacaaacctatcaaaaaaagatattgaagaattcaaagaaaactatccattatttgatgaacaacaaaaaatagctaatcttttttcacagattcaagcactaatcagtctccaacaaaacaaacatactcaactaatcgccttgaaaaagtatcttttacaaaagcttttcatctaaaaaaagtggtatcagcatttagtttactggtaccgctttttgtttagttcagttgagatagatgatgtaagactttattattatctttattttcgagttcctcaataatatgaatataggtttcttgggtcgttgtagtgttggcatggcccagtctcttagcaacactagcaactgacactccttcataaagtaataatgaggcatgggtatggcgtaaaccatgaacagaaatagttggtatatctaatttatagcaatatttttctaacaagccattaacagtcgagttaaatactcttttattgtgtggcacaaaaattggccagtcactttctttatttcgaataagtgacttaaattgattcataaggtgccaatcgaccatcacaacacgatttgaagattcattcttagttttttgaaaattaccaattggcgttttataattccaagatttattaacgataatttgctgcctttcaaaatcaaaatcttctggagttaaggctaacgcttccgcaaatcgtaagccagtctttgatactaataaaataaaccaatcccagtttaattcgtcacctagatcaagatggcggagtagtttttgcaattcataaaggttcaaaaatttattctttttattgctaggatcaactccctttataattgctcgccgtgtagggtcatgttccagtaatccttcgtctagtgcatcaactaaggctgcttttaggtgatgatgaaaatcaagagtagtttgtttttcatgagtagcagcatagttatttaacaatttttgatatgattggcgagtaagttcattcatatgtaactctggtgcaagttctttaatttttctatgcgttaaataatatttatccaacgttacttttcgaactgctttttccttataaagtttaatccaatccatatagtatttataaaatagctttgtactgtagtgtttccgagacataataaaacctccaataaataatctagtgtcaaaaacacaaatgtattatttattggaggttacgcttcatgcaataaattagataaagagcttttgaagaagatattttttaagaatagttaattgatcgattttagattgctggagtttaatcaaactatcaattttcattatcgtaatgcttattaggttttcttcttcaattttaggtaaacttaacttcaaatgttttactattttagcagataagttcccttgtcccccttgaagataggttgaaataatttttcttttgttcttaattaaccaagtttttataaaatacacgttgtctttttttaagttaattgccattacagcttgattaatagctccatcaatttgagctattccaacctctccactagttgctccataaagagcatataaaagtgtccctttttttataaatttagcagatgaattttttaatccatctggtgttaaatgtagctgagtggtatttttattaatttctgcagatctaatgaatgggatgttaccgccatagtaatccttattagaaatagccggagttcctccagaaaaagtatttgctatatcattaaatttatgaggcaaccaattatcattaaagtttttaaaccttaaaattggttgtttacaatctttatcaataaacattcgctgtaatgaaaaaatcttaagttgccttaattgttccaattttcgttgctggagatcaattaatttttgaatagttagtattaaatcgctaatcttgttttgttcgttctccgagggggtataaattatatatttttgatattcttttgcattgattccaggctgcccagatctcatagaagttacttgaacaaaataatgatatcgaggtagaagtgttgtatcaaaaataaaattagtagaaaagtggtctttaatgtgagctttgattaaaaaaccagcatagtacactttaccgtcgatattactgtacctgtaacttttaccaacactagcaccagttcgtgcaaatagaatatcaccattggctaaaagataattatcatcttttaatttaggagaagttaaatgtgatatatcgaatttatgagatacatcgtcaatgtcagtaatacgcaaatacttatttataccatcgtagtcagttgcaggtgtattaagaccatattcaaacccagtaagagcctcccccaacttacgctgctcccaatcatcagtaaatcctttaaaacggacttcaggcaccaatttttcgggctttttatccattacgctttacctcgttttctaacattttgataaattcgtttaagtctttttgggtcttctcgtcttttgaagttagctctttcatcatccccaaaagctcaccttgggtctgttcaatctctttttgagtctcttccatttcttttgttaacttcccaagatcaactggtggttcgggttcaaatgtgtcaacatatcgcggaatattaaggttatagtcgttttctttaatttcatcgatcgttgccacatgagcatacttatcaacgtcttttctttccttatatgtatcaattatcttatcaatatcttcttttcgtaagacgttttggttcttacccttttcaaagtttttgcttgcgtcaataaacaatacatctttattttctttattcttctttaagacaagtacaactgtcggaattccagttgaatagaataaatttgctggcaacccaataattgcatcaatctgatttttctctaataaagctttccgaatctgagcttccttagcaccacggaatagaaccccgtgtggcaaaacaattgccatcgttccatcttgttttaagtgatataggccatgcaaaagaaaggcatagtccgcttttgtcttcggtgccaatgctccatactccttaaaacgaggatcttttagcttattatcattgttatcccatcgtgcagagtaaggcggattagccacaaccatgtcaaaactatgtggatgatctaccccatgttcgtctactccatcaggccaatccatttcaagcgtatctgcattttttagcgtcatgttttggtaacgaacatcgtgcatcattaaattcatccgcgctaaattataagttgtcgtgtttagttcttgaccagcatattttaacttcttaccaggaacttgatcttgaaccgtcagtaagagagagcctgatccacatgcaaagtcatatacttctggattctgaatctttgagtctaaatctaaagctaccaatttagctaatatttctgaaacttggtgtggggtatagaactcaccagccttttttcctgagtttgtggcaaactgctgaattaaataagtataaatatcagcgaggatatctttgccgttttcatctttatattcaatttgatctatcaagttaacaatatctgttaatgctttagctctagcagcagtagtattacctaggcgagaatttccaagattcatatcatcaaaaattccatggaaatccattttagcattatgattaagattcaaattatgattaaaattatctaacatatcttgatagtctgacggtgcaattgtattgttattgactctatcgacaattgatgcccaagtatatttaggggcaattgcataacctaatgcccctgcaatttcaggtaatgcgtcaactagttcttcttctggtatacccaaatatgcatcatttacactttggttattttcaggaaatactactttaccttttaataaatattcttcctgattttctgatagataacggtagaatacgaaacctaaaatgtaatttctatattcaccagcatccatattacttcttaagcgattcgccatttcccaaatctgactctcaatttctcttgtagtactcaattaaaaaactcctaatatttttctttagttcatcagcaaattcagttatattttcacgaagtatccttctatatttaaatctattcatatttcgtatttcttcagcttcagcatcagtcttgtatactgcttggccttccatgacgatgttgtcgagctctccatttccgtttaggtcatcggcgccaatgacatgcttatctaagatttcatttattaaatgtgaatcttcaatatcagctagtccccactttttcttatactcaaaaatggcagaacgttgttgcccttcattattttgggcaattaactttttaacgtgcttttgttgcacagggtattcaaatttaacctttcctttgaagagatccttaataaatcttagaattttggccgcatatccccgatcttctaatttatcagaaataatctttacttcttcagcggattttttagcgccctcaatgtcgttatcgtgatacttattcatcacttcaacaatcaatccctcaaggtaatcccaattgaccttcacttctttaacgtgttccatttggaggtcaacttgcgagaaatcaatatgatgccttttagcaatttttgtttttagccgatttgctaaagtggttgttaagatttcttcatcatccaagctcatccccaatgaagttaataatttttcaggatgtgtatcgtcatatttatcgtcttgtttggcaattgccatcaaatggttatattggcgtaagtctttgtacatttgttcttgtgcattttcgcttgctgggatatcagtaaaatcttctgaaaaaccagctaacctgtttactaccttatgcaactctttcttaacttcaccataggaaggggcaataacaccatcgtttttaccttcatcgttaaaaagttcttcttgaatgttagcggagttgcggtttgcatattttgccaatgcacttttcattaacttttccgtgtgtttaggccatcggtaatttacaattcggccgaatggcttagtttgcatatcctgaacccggtttgttcgcgaatatgcttggattaaagctgcaccctttaatgtccgatctacataaagagtatttaattgtggtgcattaaagcccgttaataattggtcaacaacgatcacaagatcaaagtatttgccatcatcaattgtccgattcaatcgcgaaactacttgttctgtatattctttaacctgcttatcattaaagctagtaccaaacatttcattgtagtcttgcattgcgttacgcaaagaatcatttgtctctagctgattatcaccattggacgtatcttgactaaaggtaattccaattcgtaatggatgttcccttttcgcattttgcttcttaaattcgttataatactccatcgccattggagttgatgctttcccgccaccaacatgagtagtaagaattgcattgtacttactattaacagagcgtttattccaatttttcaagatatcctcaacgaccaactcaacatgtttatgattttcatcatagacacttggctcaaccttatcgtccatgtcgttttcattcatgttggcgattcgttcttggatttcctcatctgtcatcttaggatagcgagccttaaaatactctggcagatattgttctctcagtactttttcagttaatgttgtctcaaaatccaccttgaatccaagaacattaccatctttaatggcatcttgaattgtataagtatgaataacatccccaaagatatcacgagttgtcggcgttttagacttaccattttcttctggaaagacaggagtcccagtataaccaacccaggccgatttaggaaaaactttccgaattctttgcagcatttctccagaagttgagcggtgagcctcatcaacaataaagacaagattcttatcaacaggcttgaagtcattgcttcgaaccattgcatccatcttttgagtagaagttacaataattccgtttcctttacgcttcaatttattagctaatgcccacgattagcagtatcagtaactactcccccattacttccttcagtattttcaggatcatacgccatatattcatcaactgtttggttagttaaggccactcgatcaaccataaatacaactttatcaacattaggtaatcgtgatgcaagccaggcagccttaaatgaactgatggttttaccagatccagttgtatgccaaacatatccgattcgttgatcatcaatcccaaacgtatgctcacgaattttgttaatgacccgttttgttgcataaacttgatatggacgcataatctttatcatttgatgacgggtgttccatccaaaatcatataatttgttgccatttgatgggccatcggaatcgataacattagatccgcaaattgcattgcatctagcactggtttattatcctttgctcgttgccattgaaaagcaaaatcggtattaaacttgtcagctgtcgtattagccatgtaacgtgcatcatgtggtgttaaggcaactagaatttgaagagtgccaaaaaatatcagaatattggtcttcttcgatatattgatgcatttggtttaacgcttctttagcatcccgaccatcagctttttcctcaatttggataatcggtaaaccatttattaacattgttacatcaaaacgacgattcttccgtcctggaattactgctggacgctcaatctgattaacaatttgataaacagtattcccagcgcctatttgatcctggtcaaaaactgttaaatatacatgtttaccatcatcacgatcaatttcaatttgcgatattccattagtcccgtatagaaactgcccagcttcatagggagtatttaatttattgactatcgccttcacttgattaaattcggttggcgataacggtttctctaggcggtcttgattatgttgctcaagaatacgcttaaagttgtcccacaattgatctgttgttttaatctgtggtaagtattcccattgcttagttccacctaaattactaagatggttaattaattcattttcaaatgctaattcgctcttccaaatagtcatttaataacccactttaactttatattctttaacattataagaaaaattaacactcctatgcaacgtaagtaaaaacatttaagcattttactaagttttagcaaaaaagtatccttttatttttaatttatgcaataattaacttgttgttagaaattaaggttatacttaaaggagattttattatgactgaacaaaaagttgctgttattactggtagtagtcgtggtatcggaaagggcattgcggaacaactaggaaaagatggctatgcaatggtcattaatggttatcataaagaagaaacagacaagacaaccaaagaattagctgacaaaggatataaggttgtggcagctcctggtgacgtttcaaaaaaggaaactcatgaaatgcttgtaaaagctgctgtggataactttggacgccttgacacttacattaacaatgccggaattgcacaaattggtaatctcctagacgaatcagccgaagaatttcataaaatttacgctactaatgttgatagtgttctgtttgggattcaagctgctgctgaacaattcaggaagcaagatgatggagataaaatccgtaaaatcatcaatgcttcaagtatcgctggacacattggttatgaacaattaggagcatactcttcaactaaatttgctattcgtggattaacacaagtagctgctaaggaattagctaaatttaatattacggttaatgcctattgcccaggtattgtgggtaccgatatgtgggactttatcgacgaaaagatggttgaagaaaatggtggtgaaaaaggtcaatacttaaaggccgctattgacggaattgctcttggtcgtgttgaacatccatcagacgtcgctaactttgtctcctacctcgcttcagacaaatctgactacatgactggtcaagctgtccaaattgacggtggagttcaatttatctaatttagttttcaatataaaatagtaattccctaaccctgataaaaaattaccaaggctagggattttttatcctccccaaatcataagtcaatctacatcccccaaaatgctataatcaaagcaaacctatcaaaggaggagaattgtatgtttgaagcttacaaatactactgggaaaacgcctttaagtaccgggctacttcaacgcgggcggatttttggtggccagtattagttaatttcatcatttttgttattttatatttcttactagcaatcgctggttttgcttctgtcacttcgattatgaatggctataatcgtggcgttggattcttaattttcttgctcttcgttattgcagtattcgctattgctattattattcccggaattgctatctgtgtccggcgggttcgcgataccggtttgactggctggaccgtattggttttctggttactttcccttatttttacaagtaacgacagtgcagtgatggaaactatttcctcagtcattgatataatcttcttagtgattctctgcttgccaactggttacgtcaataaacaaggttggtggagcgctaactacgacaacgatgttaaggttctatcattacgaaacaataattaaattaaaagagctggtgcctcaaaatgcagcatcagctcttttaatttagtcaattttaattatcccttgtaaataggttggtatgaaccccgcaaagtgatcttatcaagtccgttatcgaggttgtacttatcgtcactaagcttcttttcccggtaacctgcccgtgaaaaagcttcgactaagcgcgccataaattcttgaccaccttctgcagtttcataaatcatgtggtcaatgtattgtggcatgtttgtactcttccgcaataaagtgattaagtacacctgcttatcagtcttgttaatttctgaggtattttgcatcaatgacatatctatttcctcctattcaatccaagaattctcttcctactcatattataaattatgtacaggattagtcaaaactgtttatcaaaaaaatgagcgaaaacacgaataagttaatttagaaaataaatgtcctcctgtaaaatataataatatttttaccctaaccctgtaattttcgttaattaagtgttactataatggcgaaaggaagcataatcatggaaattaatgcagatgctcttaagaacttccaagattcgaagttcaattttgtagatgcagatggtaatgatgtagactttgataacttggacgaaagtgtaaagtacactcttcgtgatggtgaaacagttgttgaagatgatatgcatgccaaggacgttgttgataccattaataatgaatatggtaaaacaatgaacgtttaatttcttgatatgtagaattaaaaataggttcctatcactcaatctttgatagggacctatttttttactatctaaattgcttctcttgcccaagagttctaaaattagaaataaattgaaagataagggactcttatttatgatgaacattttattaatcatcttaacggcaatttttattatcgaaagtatttttgaagttcgttatttttaccaaattcgaaccatttttaatcaatctggccgtattgaacctactaaacgagttcagcgaatcgtcacaattgaaactcagtggtcatggatttcatggatcttcttactcttactgtttgttttaccagacgtgtataccgctattctcatctgtgtcattacccttattgaaacatgggtagtctacgaactttacaacgctcgcgaatatgctaagaaaattaatgaaaaataataaaagtaaagaggaaggtgttacaagcttaacgccttccccttttttatgctacacgcacttttgttaacagttcataaacataagacaactcacttggacgaaaggcgccatggagggtccccacttttttaaagccgctcttagttgcgatccgttgcattgccatattattttcatttgtgcttaaacgaattgatttgatttctggacgctcggtctccaaatactcaatcaaactcaaaaataatttggatgcatatccttttcctgcgtgtcgtgaatgaatagctacgcggtggattacaacataattttcagtattaattagccattccccgttgagtttgtcataaaaatgatccggtgcttcaacaattgctaacgtgccaactgtttgtccatcatctgctttaacgagataagcataaccattctcaatatcttcttttacatgggtaacgttcggataatccccctgccattggtcaacgccccgctcagctaactggttacgtccatcacgtaaaatatctactactacatctaaatctgccattgttgctttccggattttcattgtaatccctccttaaaatcgttgcttatagctaaaccataacaaattaagcaactaatagtatcacaccttgagattcatatgcaattactttttatttttaattttaggaaatcgataaacttatattaaataagctattgacatcgcttacatctaatattatattattaggtgtaacgataaactaaagcgttttcaaataaataaagggagaattactacaatgaattattttatcggtgttgatgttggaactacttctacaaaggcagttctatatgaccaaaatgcaactgtgttagatcaatttagccaaggttattccctttaccgcgatgctagtggaatggctgaacaaaacccaactgcaattgtcgaagcagtcgaaaaagttattcatgatgcagcacaaaaagcagatttaacaaatggaaaattgttagcggtatcattttctagtgctaaccaaagtgtgattatgctcgacaagaatttcaatcccctttcacgggtcatcacttgggctgatacccgtgcacgtgatgtcgccaacgaattaaagaatagtcctgctggtcagcaaatctatgctaaaacaggtacacctattcatccaatgtccccattgaccaagattatgtggctcaataagacacaagcagataaggttgctcaaactgcatattttggcgatatcaaatcctacctcttccaccagtttttcaatacatttaaggttgatgtttccatcgcttcatgtaccggaatgatgaatgtcaatacgtgtgactgggacgatcaagcattggaactcgctaacgtcgactgttcccaattaccagaaatcgtgaacggaacaacccaagcgattggcctaacagcagcggcgcaagcaaaaatgggtatcccgctgacacgccatttgtctatggtgcctttgacggtgctttatctaatttaggtgtgggggcaattaagcaaaatactgttgccattacgattggaacttcggctggtgttcgggtagtaactgaccatccagtgatcgatcctcagcaacgactcttctgttacgccgtggataaaggtttatgggtcatcggcggtccgcttaataatggtggcgatgtctatcagtgggccgttgaacacttagttgacgctagtgcagttaaaaatgaaaatattgatccctacactcttgctaaccgagttattgaaggtgttcccgccggagctcacggtttgctcttccacccattccttggcggtgaacgggcaccattatgggacgctaatgcgcgcggtagtttctttggactttcccacattcatactcgtgccgatatgctgcgctcagtaatggaaggaatttgtatgaatattgcaactgttttccaagcggttcgtgatcttgttggtaatcctgcaagcgtaactgcaactggcggttttgcgcgagctgaagtttggcggcaaatgttagcagatgtcttgaactgtccggtcaatatcccgaactcatttgaatctggttgtctcggtgcaatcaccatggcaatgaagagtttaggaatgattgaaaactatgaaatcattaaaacattagttggtgatatcagttcttatcagccaaatcaagatgcggttaatgtttatcaaaattacttaccactttttaagcaggtcgaaggattattaacaccagcctattcgaccatcgctaaattacaacaacaatctactactcattagggggttattattatgcctttacttattgttttaatcggggttattatcttaattttcatgattgttaaactaaagatgaacactttcgttggtttagtaatcacatcattcatcgttggtttgttactcggccttccacttacaaaaattccgcagacaattgaaaccgggatcgggggccaattaggacacttagctattatctttggtttcgggtcaatgcttggtaaattagtttctgatgccggtggtggatatcgaattgcaacaacattgattaataagtttggtcggcgttggatccaagttgctgttatccttgcctcctttatcattgggttagcattattctttgaagttgggcttgtcgttgttttaccaattatctttattatcgcccacgagcttgatatgccattgatgtatcttggtattccaatggcagcaaccttaaacgttacccacgctttcttaccaccacatcctgctccaactgctatcacggacattcttggtgcaaaccttggacacgtcttgctgcttggtattttagctgcaatcccaacaatcattattgctggtccagtttataactgggtattacaaaaagtttatccgcgtgtttaccgtaaaaatattgatatttcagttcttggcgaatataaagaattcaagcttgaagaaacgcctaaattcggtatctccgttttaactgcaatgatgccagttatcttaattgctgtcgctactatttgttcatttattttccctaagaacaatccagttaatgaattcattcaatttattggtgctcctgaccttgcaatgcttctttcattaatcttcgcaatctttacaatgggattatggcgaaacaagaaaatggaagaaatttcaaccgcccttgccgactcaatcaagcaaatttctgtaatgcttttgatcatcggtggtggtggtgccttcaagcaagtccttgttgatggtggaatttcaaaatatatttctggtttattcgctcaaactaacatttcaccaattctagctgcttggttaattactgctttattacggatgtcacttggatcctcaacagttgctgcgatgaccgctgccggccttgtggttccaatggctcaccaatttggcggtaactcaattatggcaacattgatggttctttccatcggtgctggttctgtcttttgtggacacgttaatgatgccggtttctggatgatcaaagaatactttggcctttcattaaaggaaactttactttcgtggacaactttaacttccgtcttagcactcgctgggttgggagccgtctacgccatttcattatttgtctaagtcaatttaagcgtcctagtgaattagctagtgacgctttttgtatggtttggtattcttaataatagtagaactattaaggatgatgaataaacaaatgacgcaacatactactatcgctgacgttgctaaagcagctggtgtttcagcgactaccgtttcacgtattattaatggtcgttatgataaaatgcgcccagcaacgcggaaacgggtggaaaaagcaattaaagaccttcaatttgttccaaccgcttctgcacgacagcttcgccaaactcatagtcacgttgttggaatcctcgttggagatatttctaaccccttttcatctttacttgccaaagggatcgatgatgttttgcaacaagcgggctatgatatcctcctcatgaatacgaataactcgcgggaaaatgaaagtcgtgctcttcagcgtctatatcagcaacgagttgacggaattattgtccagcctaattcccgccactttagtcaatttgcccctactattcacaatgatattcccctcgtgattgttgaccgtgaagttgatgaccagccttctacagttgggaaggtcacttctgctaatcgtgatgcttgttataacctcggtaagattctttatcaaaatggttatcagaatattttaactgtcagcgcgcattttgcggaggcatcgggtcaaatccctcgaattgccggtttaaaggttgctgctgctgataatgggctaagctatcacaatattgaaactcggggacatgatcggcagtggcttgctaaaatgtttttgcaacagttaaatgaactcaaaggcaaaactgctgtcgtttcattaatggggcccattttatttgatcttttagcgatttttaaggaactaaacctttccttccctgacgatcttggcttagttagctttgatgattgggaatggtcgcaatatgtcgctaatggaatctttctgttgaagcaagatatggagttaatgggtagcttagcagctaataagcttttaacacagattaaccaacaaagtaccatcagttccactacccttttaccagttgaaatcattgcacaccagtcactttagcatataatattacaaagagaattaaattgagttttaaaggagaacaataaatgaactacttaattggtgttgacgttggaacctctagcacaaaggccgttttatatggtcaagatgcgcaggtgatcacacaagctaactatggctacgagttgcaccgcaatgccgcgggaatggcagaacaagagccagaagaagtaatcaatgctgctgaacaagctatccatgatgtggctacggcagctgatctcagtacggggaaactactagcagtctcaatttcaagtgcaaatcaaagcctcctcttattagataaaaataagaagcctctttcacggttaatcacttgggcagatagtcgagctcagcgcgcagcagacaaccttaagatgatgactgaaggacaacaattatatatgaagacgggggttcctgttcaccctatgtcaaccttgacaaagctcctttggttaagggaagacgaacctgatttatttaaccgcacagcatattttgctgatattaaggcttaccttttctaccggttatttaatgaatttaaggttgatatgtcaatcgcttcctcaactggcttgatgaaccttaaaacttgtgattgggatgaccaggctcttcgggttgcaggaataaccaaagatcaactgcctgaaattgtcgatggaacaactcaagcaactggtttagtgcccgaagcccaagaaaaactaggagtaccagctgatacgccatttgtttatggtgcttacgatggtgccctttcaaatattggtgttggtgcaaccaagcaaaatacagtagcaattacaatcggtacttccgcagctgtacgagtcgtaactgatcatcctgttattgatccagaacgccgcctcttctgctatgctattaataaaggattgtgggtcgttggtggtccgcttaataacggtggcgatgtctatgaatgggcagtaaaacaccttgtcgatagtagcgcagttaaaaacgaacaggtcgatccttatactttggcaaatcacgttattgaaggagtaccagcaggcgcgcatgggcttctctttcatcccttcctgggcggtgaacgggcaccattgtggaatgctaaagcgcgtggtagtttctttgggctttctcatatccatacacgggctgatatgctacgagcagttatggaaggaattagcatgaacattgcaacagtcttccaagcagtacgagcgttagtcggtgaaccagcgagcgttactgcaacaggtggctttgctcgctcaaaagtatggcgccaaatgcttgctgatatcttaaactgtccggttaacgttcctgactcatttgaatctggctgcctcgggtcagtagttatggctatgcaaagcctgggaatgatcgacagtcttgatacaccacagaagttcattggtaaggttagttcttaccaaccagatccagccgcagtaaaagtatatcaacgctatactccactcttccaacaaattgaagatatgcttgctccggcttattctgaaatcgctaaactacaagaacgccaaaacaattaaagaatcaaaaaatcgatcttacaatcattttccgatgtgagatcgattttttaattatgactattctgttaacaggttcttaatattacctttagcatttcaaaaagtaatgtaaaacgcttccaaacatgttactattagcttgtactaaaaaattatttatagaaaggaagtggtactaatggccgcatggaaaaaatggtgggtttcatttgtaatgatgcttcaagtaatcgttggaattgttgtcgtatcattatggttttatcgtgaccaaacttggacaattccagttaatgattggctttatagccccatcggtcaaagtttttcagcaggagtcgcagtatttttaatcattgttgctttaaccgtaatagcaattgctgtttttcgtcccacaacaactaaacaaatgacaatcgctagagatggcgctaataaagttcaaattgatcagcatgcagttgaacacagcttaactacttcaattgccaaatttgacctttataacccagtgattaacctcaagatgcaccgtaacaatcacaacgcagacgtcaccgttcatggaatgctctctaagaggaccaatccaaaactaattcatacagtactactccagacaattaaagaaaaccttaaacgggacttcgacattgatcttaataaattacacattaagctaagtccctactcaaacaaagaatcagtcaacattgtctaaaaaggaggtactatatgaaacttgctacaattggcgttatcttaggactgcttatcagcattagttggattatgtggggctttttcccaatgattggcattctgttagctgtcactatcttaggcggaattggctatgttcttgatgcaagaggctattcattaaataaacttgcgataaaaatgttagataaatttgccaactaattcaaggaggaattaatatgacaaccactacaaataataaaacaattgatgagcaattaacattcgatgatcaagtaattgaaaaaatcgctgggatcaccgctagcaaagttcctggaatcctttcccttgatggaaatatgtttagtgaattagcagataaagtaacttccggaagcaatccaaccaagggtattaatgccgatgttggtgaaaagcaagtcgcattaaaaatggaagctaccatcgaatatggcaaaagcgctccagaaatttttaaggcagtttgttctgaggtacaacacgcaatcaataaaatgactggcttgaatttagttaagtttgagctacatatcaatgatgttaaaacaagagaagaagtagaaaaagatacaaaataagggaacgagccaagtatcacgggcactttcgttttcaacatgaagcccctatatgcaacataggcctccagcgttcggctttaccgggcgttgggggcctatttcgaaatgtgactgaacttttatcacactcttttacataataatcatttaaaatggcggcctaaaataactaaatcacgtttaatcccatcaagctctgctacttgtggtaaaaggccccattgagtaaaaccaaacgatttaaataactttaggcttggaatattatggccaaaaatataagccacgattgtattaactgctaaattaggcaattgaccaataatgaattccatggtttttgtaccaactccttgtttccgcaaccgttgatcaaggtaaatagcaatttcactagtatgattatatgctggacgaccataaaaatgttcaagggccacccacccgagaacctcattttgatgttcaattacccagattggatgattttcgtcaaatgcttcaaaccattctttgcgttcgtcaaccgttatcggggtgagatctgcagtcgctaaccgtgatggaataatttgattataaatttcaacaattttgggtaaatcttcaagtgtcgctttgcggtattgtaactccactatactttcctctaaaaaatttcctgaactaatttttctgaaccattcgaactaacccaatcatcatacttaataaaattccgattgatgctagcaaggtatatcgccgtaattgttgattttcttcagttaatagttttatttctcgtcgcatagcttttttcttcactgtaagcaccgccttcgttaattctaacaagatcatcatatcatattatttgcgattgcttcttaatattttatctttatcctgttaatgactacataaggaagtgtgtagagggtatgatttttaacgatattattagcattttattattttgcgcgtttgcttatctttttaattttaactttcaccgcgataactatgcctatgctattgtgatgtttatcggcataatggtattttatggcgatttttaccatcatctcccaatcaactggaaattgtatattttacttattgctacttttttatgggctttattcacaatcttcatggggagacaagcattaattaaaccagctcaacgtaaacatttttcctatgcaacgattattggaatttttgcaattattatcacttttatcttcaggattattctttaaaaacaataagggagcatgatcatgaagtcgtatctggcttctatcacgctcccttattatattgctagcaatcgtgtgctcgatcaatttgagaatttaagtctgtattactaagatccagaacttcaagattatctgttaaaacgcgtttaggactgacaagtggcattgtaaagtaacgcgggttaaaccttacttccatttcatcatcaaattgaactgctgtatggtctttaataaaaacatcccctaaattagaggtaatcttttcattataatcgggggtatctaaatcctctttgacaaggattagtcgataatcaccatctaaactgcaacccccaacggcagaaaatggaccaaccccatcatcaaaatctaggagtatcttcttagatgacagttcataacgctgtaaacgttcgatagcttgatcagtaaatgtgatattcattaatatcaaccccatttcttaaaatctgtacttatattttaactaattaagaataagctttgaaatttaaagctcaaaaaaactgagaaaaatcgcaaaatctttctcagttttttaaattaatttatttattaaccttcgaatgcatcagtcaaaggaggaacaacttgcttcttccgtgatacaacacccggtaaattcatccgcttgttttcgttaagcttcttaccaaaggctgcttcaaccttttcagcaggatcaccaataactaataactctgagtcactgtttaagatgttagtagcgattaataagaataaatcataattgttatcatccatcatactttgcatttgactttcaagatcagcttgacgagcaaaaacatcatctaaatcaacggtgttaacttgaccaatacgaactttcttgccgccaagttcaaaggtcttagcatcaccatcaacgatatcagcatcagacttagcaccaaggttagtaccagccttaagcatttcaatgccgtacttttcgtaatcttcaacaccagcgatctttgctaagtacttaacagcttcacgatcgtggtcagttgtagttggtgacttcaaaagcaaggtatcagaaatgatagcagaaagcatcatcccagccaagttagcgggaatattaatgtgcttttcttggaacaattctgtaatgattgtacttacacaaccgtaaggacgaacagttgcccagagtggttgagccgtttcaaagccggcaattcggtggtggtcaactaagtgcgttacagtgaccttgtcgatatcattaacactttgttgtggttcgttgtggtctacaagcattaccttatctacttcgtttgcagcggtttcgattacgcgtggtgcttccataccgaaagtcttcaatgcaaacttagtctcatcatttggttcacctaaagcaactgcttcagtttcgtatcccaattgattttggaagtatgaaaatgccattgcagcggtaatcgcatctgtatcaggcttttggtgtccaaatactaattctttgctcatataaattcctcctgtttgttcactactttaatcttagttatttctagtaggtgaaacaatctacattttctattctatcatggaagttaatagattaaagaacaattattaaatatctttcctattatgaataaaatcttttaagatctgccacatttgttcatgctgactgttaaaaaaacgtggtggttctttatctaacgaaaaatattcagtagttgtcgtttctgtaattttgggctgataatgcttagcgctactttcttcaactaagtaaaaagcattaactggttgaacgcggtcaccattaggataagtgtaaaaattctgatcaaaaattgctagtcgtttgacaggcacgacttcaattcccgcatcttctttaaattcccgctttacagtttgctcaaaagattcgccaaattccatgtagccgcctgggaaaccccaatcaccagtgtccgcccgttcttgaagtaaaacagccttctgcttgtttaagagtgccccagaagcactggtcattattaagggacgattcccaactaaatcacgaatttctttaatatacgccaaacttttcgccttcttttaattttggctaacaggttcttcggataaaacattcgtttgtttcattcgaagttttattggttccccttgcgtatcggtatcaattacaaaagttccatttgacttaatcgaacttagatgatggtcagtagccattatatcttggaatgctggccggttagtaatagtctcaaaagcaccttgataatcatggtcgtaagcaaggaagtctgcaatttcatgaggatgtgatttcaaccgccgaaggacaagttcgccccgccgtgctcgtgccccaacttcaatctcatcaactggcatttccttaaatgcacctcgttgagtaattacagcaatatcttgaccatccttaaccaagatttgatctgctacttggtcatcatctttcaaattaatggcccgtacaccagctgtccggattcctgttacaggaacatctgcaacatcataccgcactgcatatccttggcgactaatcgtcaatagtgaacggttctcatttgttggttcatagtaatcaacatttacaacttgcgcattatccctaagcttaattgcgacacttgcatggctcttgtaacgtgaaccaggcttatagtcattaaaggccgtttgctttacttgaccatcgctagttcccatgatgattgttcctggctgatctagtttatcaaaaatcattgctttaatgatctcttcattatccgctaaaccgattgtttgtgagatatgttcgccggtatctttccaccgggcatctgcaatttcatgaattgggcggtaaataatatgcccaagattggtaaacataaataaatgcgataatgtatttgtttgttgaatcaataatgggtaatcgtcttctcggagaccgttttcttctgcctccgatgccttgaaggaacgaatgctgcttcgtttgatatagcccgcatgcgaaactaagaccacaacatcttcgttggcaaccgtaactttagtatcaatctcaagtttttcaacaagattttcaatcttggtccgtcgtggattgccaaattccttcttaatggccctaatttccttagtaagaacttttgctagctcattttcgttagtcaagattaactgatattcattaatccgtgaatttaattgttcttgttcttttttcagctcagttacatccgtatttgttaagcgataaagttgcaaggtaacaattgcttcggcctgttcaggtgtaaagttgtattcttttactaagttttcctttgcatccttacgattcttacttgctcgaatcgttttaatgaccttatctaaaattgagagtgctttgattaacccttcgacaatatgcaatcgttgttgagccttcgttaggttatattgtgtccgtcgacgaataatctctttctggaattcaagataggaagtcaaaattcgcttcaatccaacacgcattggccgctggtcatcaatcgcaaccatattgaagttatagttaatctgtaaatcagtgttctttaataagtaattaagaataccgttcgcattagctccccgctttagttcgattgcaattcgtaatccactacgatcagtttcatcgcgagcttccgcgattccctcaacttttttggcaaggcgcagatcgttaattcgcttaactagttgcgccttatttacttcataaggaatctccgtcacattaatttgttgacgatcaccccgcaaggtttcaatctccgtttttgctcgcactacaacccgaccgcgaccagtctggtatgccttacgaatgccatcaatcccctgaatgattccaccagttgggaaatcagggccaggaataaattccattaacttatccaaagaagcagttggatgcttgataagataaatcagtgcatcaagaacttcgcttaaattatgtgttggaatctcagtagcatatccagcagaaattccagttgctccattaacgagtaagttaggaatacgtgctggtaaaactgtcggttctttttcagtatcatcaaagtttaaggccatttcaactgtatctttgtcgatatcttgaagcattaaacctgctattttactaagccgcgcttcagtataacgcatggccgctggtggatcaccatccattgatccattgttaccatgcatttcaattaggggttcacgtaatttccaatcctgacttagccgaactaatgcttcataaattgaactatcaccgtgggggtggaagttacccattacgttcccgactgatttagcagacttacgaaaccctttatcataagtatttccatctttattcatggcaaataaaatccggcgctgaaccggttttaatccgtcacgaatgtcaggtaaagctcgttcttgaataattgattttgaataacgcccaaaacgatcacccatgatctgttcgagcgtcatatgttcaatttttccgtttctcacaaaacttgattcccttctctatttattccatgtattaattgtaggctctttagtttgaggtaattgtcctttattctcaactaatttatcagattcttgatcatcggctaacgtgaattggacattttcttcaatccattctcgccgtggttccaccttattacccattaaggtagttacacgacgctcagctaattcagcatcctcgatccgaacttggattagtgtccgagtttctggattcatcgtcgtttcccacaactgatcagcattcatttcaccaagccctttgaaccgttgtaattgtgctcccttgcccatctttttagtcaattttgttaattcttcattagtccacgcatacgtgatattagtcttagctccacgtccgcgttgcaagcgataaagtggtggaagagcaatatagatctttccagcttcgatcattggccgcatatatttgtagaaaaaggtaagaagaagaatctgaatatgagcaccatcatcatcggcatcagtcataataataatcttatcgtagtttgaatcttcaacgttaaattcagaaccagcaccagcaccaacagtatagataattgtgttcaattcttcgttttttaatacatcatctaacttcgccttttctgtatttagcactttccctcgtaatggtaaaattgcttggaatttacggtcacgcccctgcttggctgaaccaccggccgaatccccttcgactaggaataattcatttttcttagcattttttgattgggccggagtcaattttccagaaagattgcgttcttttttgccctttcgtttaccaccacgagcttgattacgggctttacgggcagcttctcgagcttcacgcgcctttaatgccttacgaattaacatctgagcaaagtcgccattttccattagggcatagttaagctgctcactgacaatcgcatcaacaatcttccgtgcttcaggagttcccagtttatcctttgtctgaccctcaaattgaagtagacgttcaggaatccggacagaaataacggctgttaacccttcccgaacatcactaccttctagatttttatcattagcctttaacagcccaaccttttttgcgtattcattgaaagttttcgtccaggcactccggaatccggcttcatgagtaccaccatctggagttcggacattattgacaaatgataacaagctctcagagtaaccatcattatattgagccgctacttcaacttcgaccccatcttgctttccgtcaaagtagagcgtctttcctaaaacgtccttaccctcgttaagataagaaacgaattcttgaattccattgtcaaattggaatacatcttgtttttcttgaccagctcgcttatcggtaaggataatcttaatccctttcaataaaaaggccgactcacggagccgattagctaaggtattgtagtcataaacagtagttgaaaaaatcttcgggtccggcttgaatgagacggtcgttccgttctcagctttagtttttcctaattttttcaacgttccaactggttgaccgccatccttaaaaatttcttggtaacggacgtgatcacggacaattgtcagcgtcaaatgtgatgataaggcatttactacggaagctccaacaccatgaagccctcctgaagttttataaccatctgactgaccaaattttcctccagcatggagaaccgtcataataacttcaggtgtcggcttaccggaagcatgcatcccaaccggcatcccccgaccatgatcttgaactgtaatcgcattgtctgcttcaatggtgacgttaatctcatcaccataaccggataatgcttcatcaacggcattatctactatttcatataccaggtggtgcaatccacgtgagtcagtagacccaatatacatccctggtctttttcgtactgcctcaagcccttttaatacttgtatggatgaggcatcatattttacttcttctttggccacaaaatgacctcccattgccaatattatacctaaacgtatgttcggaaaattattttaccatttacatttgctaattgtaaagctaaaccggccacaatttcaattcataattaaaatgatactgaaaacttagtagattggcaaattgtgtcgttagtgtaagattttcataggttggatgaataattcatctggtcgtggaaatcttttttgtagaccaatttacttatttacaaaaaaagaaaagaccagtagcctttagtgtgtcgaatactaagcaaaggcaggtctttcctcatggatattttaacagaaatcgagcagaatttggtgaaatcaggcagtttatttgaagctgaacagattattttaaaaggggtattggagttaggacaagtaatcatgcaaaactttttggaaagcttagatcgaagcttaaagtcccaagctccagcgaactatcaagtaattaataaacagccacggacgcttaattttatctttggcccggtgacttttcaacgacggtattatcaggctgggacaaagaaacgtgaattttacttagaccaacaattaaaaattaaaccacgtcgtcgtttatcgccacactacttaatgatgatggctaagattgcccaaacaactacaatgcgcaatactgccgacattttgaaccttgtatttgacagcggaattactgccgattcggtaatgcacgccgtgcatgagttaggaaatcaggtagctaaacaaactcaagcaaaagaacaccaagctactcctcgccatatgcctaaaaatttaactattgagggtgatgcctttatgattaaaggtaaaaaagaagcaggtcagctgactcttgtgcaccattatcgggtttatgagcgagtagctaatcaaatcattaatcggcatgactttctcagtgttgggcaccaaggacggcttgaagcacgactaagtgattatttagaccgccattataagcttgccggtcaaacgatctttttggccagtgacgctggcccaggttacgaaccagctaagctattaagtctagttcctcaaagtgcacatggtgaatactttctcgaccgctatcattgtttgcagaaaattgaacatactttaggccggcacaacgaattagccatgcgagcaattaaagccgttcgtcatcatgatcaagcagagctaacaataattttagatacttatgaatcacaaaacctaacggaaaaacaagcagatgacctaatgcgtttaagaaagtatctacagcgaaattggcggtatatcctctcaccacaaatgcgtggatttaaggatattcatttaattggttcagtcgaaagttctcaccgggcttttacttaccggatgaagaaacagggcaagtcatggactaagcagggggctaaagccatgattggtttaattgaagcccgaatgaatggtgaactgcaagctagtttaaatataatcctagaacaattaacagttcttcctcgagtggctcaaaccagcctattacaggaaatgcatattcgaactggagagtttctaagaaaggcaccgacaaagccgtcaattggagcagtacaaggaataattccgattaacacggccacaagtagaccaatgggacaactttttaaggcactaacccactaaaactgtatatttaaaggctacctatgaaaacttgacagatacaattgtgtcttcctagtggttaaaattaaatattcatgctatgcttaaaagctgtataagctattattaaggagctatttatatgatttttgaaattattgggatgattattattgcttacctcttaggttcaatcccaactggcctctggatcggtaagtatatttatcataaagatattcgcaagttaggtagcggtaatatcggaacaacaaatacctttcgaacattgggatttaaggcgggcgtcgttgttttggttatcgatattctaaagggaacactcgctgccagtcagccatactttttagggatatctggaaccgttaaccccctattgatcggactctttggtagtcttggtcacactgtatcaatattcgataattttcatggcgggaaagcagtggcaactagcgcggggattctcttagcttataaccccctcctctttgttgttgcctgtttgatttttatctttgtcttatgcttgacaagtatggttagtaccgccagtatggtagggattagtgcaattttcattattgccctcttcattcatgcttggattttagcaatcgtggcaggaatattaacaggagtggtcttttaccgccaccgatcaaacattcaccgaattttatcaggaaaagaatcaatggtaagttttggccttggctattatttacgagaaaagaagctaaataaataggagactggaaatggaaagtttcacagtctcctattttttcgttaaaatggcttaatactaaaatgataattatctgtttcatttggtgctagacggtgcatcccttgcttatggaggaggagcccatcagccttgacattatctgctattccccaccatggttccacacatacaaatggagctgtacttggatattgcgaccaaactcccacgtattctgtattaaaagtatcaactacgaccccgtgattagcaacagtatccgttaatttggctgtaaaatggccgccatctgttttgaaaataatagcatccttattaaaaagatcatgattaagtgataatgaatcctgcatattaatcaattgtggatgagctgaatcgttataggcgccatctaaaatgatccgtgaatattctgttgccggtttaacgcttaattctgtttgttcaaaactcccagtactagttaacggcatattaaaaccaggatgtgctccaatggcatagattaaggtttcatctccgctcgggttcttcaccacatagctaatttcaactttatcaataactaattcaaattttacttgaagactaaatgaaaaagggaatgccttcttagtttcactatcatcatgctgttccatcacaaccatcgatggtgtttgctcaataacttggaattttcgatcacgtgcaaaaccatgttgtgtttgatgataagtttggttgccatattgatattgatcatcttttaagcggccaacgaacggaaagaggattggtgcttggcgattccatgaagcggggtccccctgccataagtattcgattccgttatcctgccgtttaatactatgtagttgagcacctaattcatcaatttttacggttaattgttggttttgtaaagtaatcattgttatcgatcccttcaattgataatcgtttaacattaagtatataaaaaaggttccaaacgcacaatagcagattttggaacccttttcaataaatgtttaagtaaaactcagtaaaaatgaagtagagtttttacttctgaacttcttcttggtagtctccatttggacagacaacctgtttaccacccttgactttcttttcaacaaggaagtgcccatccttaggacaattacgtccaatcggtttatcccatgaaacgaagtcacaatctggataacgggaacaaccatagaaagttcggttcttctttgattttcgttcaacaaccgttccttgcccacactttggacatgtaattccggtatcttttacaatcgccttggtattccgacaatttgggaaacgagaacatgcatagaacttaccataacgacccattttaataaccattggggccccgcaaatttcacaatctgtgccagcaagctcatctttcatctcaatcttatcaacctcttcttcagctgcatcaacttcttttgagaatggttgatagaatttatcaacaacattaatccagttctgcttaccctcttcaatctcatcaagtttgccttcaatatcggcagtaaattggacattgacaatatcagggaattgcttttcgataattcggttgacaatttcacccaattcagttggctcaaagtggcgtgatacaaggcgaacatagtaccgtcgttgaatcgtatcaagggttggcgcataggttgatggccgaccgacgccattttcttccaaggttttaataagagccgcttctgtataacgagcaggtggctgggtaaagtgctgagctggatcgtcctttatcatttttgccttgtcaccttcagttaattctggcaacaagttatctttttcagttcctcgcttatatactttcgtaaacccagggaacttaacttttgatccatttgcacggaaatcgaccccattttgctggaggttaacgctcatcgtatcaattacttccgcagtaatttgactagccacaaaccgcgaccaaatcaaattataaagtttatactggtcggaggttaaatattgcttcattttagctggtgtccgatagactgaagttggccgaatagcttcgtgagcatcctgggccccttcaggtaattttcccttaaccggctttattgccgcatattctgctccatagttttcatgaatatagttagacgcttcatgcttagcaattgacgccacccgagtcgagtccgtccgcatataggtaattaacccaaccggtgctccttctttaatgtcgatcccttcatataacatttgtgctgccatcattgtctttcgtgttcggaagttcaaacgacgattagcatcctgttgcatggtcgaggtcgtatatggtggctgtggttgccgccgacgttcttttttagtcaccttagtaatatcgaaatctttctttttatcgattttagaaaggactgcctgaacatcatcattattcttcaaggaaaccttcttaccattttcaccgtaaaaactagccttgaattcttctttgcccttcttgaaatcagcatcaattgtccagtattcctctggtttgaagtttttaatttcattttcacgttgaataatcagataaagggcaactgattgaacacgaccagcacttaagccctttttgactttcttccataaaattgggctaattgaatatccaactaatcgatctaatacccgtcgtgcctgctgggcatccacgagatccatattaatctctcggggttccttaaaagcttctttaacagcatctttagtaatttcattaaaggtaacccggttcttttgatcatcgtcaagctttaaaatatttgaaacgtgccaggcaattgcttccccttcacgatccgggtcagatgcaagatatacggcttttgcatttttaacgtccttccgtagttccttaattacatcacccttccccgaattgaaatgtaatcaggggtgtagtcattttcaatatctacccccatccggctttttggcaagtcccgaatatgacctaaactagccacaaccttataggaccggcctaaaaatttaccgattgtttttgcctttgatggtgactccacgatcaccagattttttttaatttttgaacggcgacgagttgtctttttcgccgttgatttggttgttttggttgccattctggtaggctcctaacatttttaatatttcattcaataatattattaatccatttgactaccatctgtcaaatataatctctaattgaacaaaatattttaatcaacttctcaccagaaatcaagcccttgaatcgtacagccgaaactcatctagcagatcttgggcgctgagaattggtttcgcgccagctgcgattaaactgttacatcctactgataagggagcatcaatccttccaggaatagcgcatacagaccgattttcatctaaaccgatattagccgtgattaaactcccactccttttctttgcctcgacaaccaaaaccacttcgcttaaacctgcaataattcggttcctttctgggaagtgataagccacaggtgattcaccccgcccatactcagaaattactaatccctgtctggcaacctcatcttgaaggacttggtgacttcgggggtaagcttgatctaaacccgtcccaatcactccgatagtaaggccaccatgttttaacgccagttcatggctaaaaccatctactccttgagctaaaccactgattactactatctgccgcttaattactggtggcagcaatcctcgtaaagcgctctgtccataattagttatctgcctagtgccaacaacaccaattgaaggctgatggagcaagctcagattaccacgataaaacaataccaagggcggacagtacgtttctttcaaggtgatcgggtataacggatccgcaattgtaataaatttttcctgactgtttaaggccactgcttgatcaagctctggacttgtccaattatttttcaatgacgacgcacttcgtaagctaacatttgcatggtcaatcaaatagtcaatattattaaagcagcgcgcctgttgagcacactcccatagacgatactttgaaactaagccaattccgcgacataaacttaaccgtaatagaaaatcgtttacttgtaacataaaaaagcctccctatatttatatacgaaagctttttgaaaatgcattttttaatttaaatattttggaacgggattaaaagaacgccgatgaataggagttgcccccattttttctaagccggctaaatgttctttggttccataacccatattttgtgcaaaaccataccctggataaacataatcatagtcccgcattaggtgatcacggtattcttttgcgacaatactggctgcagcaacgctaatactcttttgatcccccttgatcaaagtcgtctgaggaatatcaattgctaacgggacagcatcaacaatcagatgatctggtcgatggtgaaggtgattaactgcccgaatcattgcatcctgagtagcagcataaatattcatttgatcaatcactggcgcatcatttaccgcaatgctaacttcaaccgcctcatcaacaatccgtaaatacaaattttctcgttcatgcctagttaactgtttggaatctgttacccctatcaggtcaaaatctgcatttaaaattactacacaagtaaccaccggcccagccaatggtcctcttcctacttcatccattcctgcaacatactgatatcccttttcccagtagtacttttcatatttaaaccggttattgaacgcctcttcagcttccttctgccgtgcaagccgccgttcaaattgctgaattgctgcttgaacaccttttcgcgaatcatcacgaatagtttgcaagtaaggatcagttgtatctgtgatagtttgtaaacgggccttaatttgactaatggtttccttattcatttagtccatcctcatttaggtcagcaggtacttccaaagtgattggtcctaattttccctttcgcaagtcaaaaatcaagcgttcactagcccggtcataatcatcacgaaagcccattttagcagtaatcgttaatagtaaatctggattggcaaccgattcgtccagatctgcatcagttaagtggtaacgttgctttaacatctctggctgatgttgccgcaagtaatcaagggcaaacaacgctacatcatcctttgcatataagctatctttaattgctcctgttaaagcaagcattatcccctgcttaggagtagcaaatttatgccaaaggacaccaggagtatcaagtaattccaattctgctgatgaccgcaaccattgctgtccagtagtgactccgggacggtttccagtagccgcaacgttcttttttaccaggtgatttaaaagagttgatttccctacattgggaacaccaacacacattgcccgaattggcctctttttcattcccttggctttttcttctgccaatctatcttttaatatctctttacttttagccgttacaacttttgccacgttattttggcgtgaatcgagagcaagaactggttgattatgttgctcaaagtatttaatccattcatttaatcgtttctggtctgctaggtccgtttttgtcataattaaaagtttgggcttttctcctgcagctagtgccacttctggattttgtgacgaataggggacacgagcatctactagctcaaacaaaatatctactagtggcatttgttcacgaatttggcgtaatgcttttgccatgtgtcctgggaaccattgaattgttgccatttgactttctcccttcttttctaattcattgcatcaatataccgttgccaagcttcatcaaaaattgtcattgatggcaaatagtcagcattttcttccaaataatgcgaaatttcatcaaaatcctctgaatgcttaggaaaagtagtatccaaaaaagcgttgtttgcaaattgttgaacttcatctgcactattcggatttcgttgagtcattaaaaactgataaaaactcattctcattttgatttcctccaatatttattcattacttgttgggaccgtgattaaaaacttaaaccgtccttcttgcatgttaatttcctgagccgagtacttaagagaacggtgcttgctataacggttaaggtctaataaaactgtcttcttttgtgggttaattgttacccatttaggaatattataattctttgcaatgtaacccatcacaaatttgatcgggatatttaaccgtccaactgaaagtcccttagcccgcaacaagacatttccgttacttagtcgttcaggaataaagttaatggcaaatcgcaccttagcccctagaaacttagtatttcctgtcaaggtagcatactgatcgccaacaataaaatcataacggatcttttgcccttttaaaaactgattcaggtaattagcagctaaagcattcacctgttttttattcaattcaaccgttactgatgaatcgcttggctttactgctttgctagttgtagtagcaggagtcggtgcagtcaccttgtttaacacaaccccacagctaattacaatcaaggctactaagaaaaaaaagccccatttccaccaattagtcttttttcttcagaatttttcatttttacctccgtgtgaattcccagctatcatgtttttgcattaccttaaataattggtcagcaattttgacgtatcccgtatgattaggatggaaattatcttctgttgaaatatatttattaaggttcttatccttatgattcataatttcaatgacccgcttttgactgacttgcccttgattagccttttcttcttccttgaccagctgttgttgctgactcttagtctgatattgaccgtatgacatcaacttattaatgttcacaaaatacattgacttataattattcattgtatcttgcgtagtttggttccattgattaattgacttgttaataattgttacatctgggaaatagatatagaagggattataaatactcatcacaaaaataggagccttaggattttcctttcgaactgcatcaaatagcttaattaatttttttgataagtcttttcgccactttcaacactactggtaacttgccgttcagagcccattacgtttttttccaagatctgcatcaagtcgttcccaccaacagtcatcgtaatcacatccgcgctctgtaagtcactacgtaattgagattgctgatttaagcggtcaagaatctggtcggatcggtcccctgttaccccgtaattgactgttgtcaccttagtttggtggtaacggtgttcgattttttccttaattaccccaacgtatccaccattattactctcatccccttgaccgtgagtaagggaatcgcctagtgcaaccagctttacatttttcttttcaacatactttggtgtaacaacttttgaactattactagttaaatttgtaaagtggttaacagtataccatcccccaccaataatcataatagccaaaagcgataataatagccatttagtccactttttcatctattctatagtcctttattttaaaattttaagaagatagaggctgggaaaaatttccatttttctcagcctccacttatttttatcaaagattattctgtatagtatagcaaacaacaagcacccattccagtgtgagttgcaataattggcactgtctctcgaacagtaacctcgatttctggataaaattcttttatttttgctaataagcgttctacttctttgccagcatcgacatgagaaattccaattcgcttaacttttggtccccgtgccatttcatctaaaatcttatcccattccttatgcattgatttaatgccacggccttttgattcaatatgaatctgaccgtcatacacatggagcataaccttaatgtttaataggttagaaatagcaccagcaaatttactaattcggccaccagcaactaaattatcaaggttatcaattgccaagtaaagttcagatttactaagtacttctttcatcttagcaattgcatcttcaacgctaccaccagcttcaatcacttgggctgcttcaattatttcgaagcccattacttggtcggttgactgggaatcgtagactgtaacttttgtctttgtcattccagccgcttgttcagccgcatggacggtcccactaattgattccatcattgtaacgcataatacttcgctaccatcttcacctagcttatcaaaggcatctacaaacttcccaattggtggctgagaagtctttggtagtgacttagcattcttcatcatttcagggaactgttcgtttgtaattgtttcacgctcaacgtataccgtcccatcaatcattacacttaatggtataattgtaatgtcatattttttaatttcttcatcagttaatcctgctgatgagtcacaaacaatttttatctttgccatgaaacttaccactcttcctgaacaatttgtgctataattatctagtattgagaactagataatttatttcaagtactattatactcaattttatctaattttgtaggatcaattactatttatttagtataacaaaaatattttaaaaattcattggtctttggaaagaggttttttgatggatagacaaaaagagacaagagatcggcgtactttgctgatagaaataggtaatgcggttactcatgggattggagcaggactatcgattgctggcttgatcttgttaattatcagagctgttcatactggtagtcccatgcgaattgttacctttactatttacggaagtgctttaattcttttttacctttcgtcaaccttatttcatgccttgatctttacacgagctaaacgggtctttcaaattctcgaccattcaatgatctttgtgcttattgccgcgacttataccccctattgtttagttagtatccgcggctggttaggctggacaattttcggcgtgatttggggcttatctgttattggaatcgtgtataaatgtatttggttaaaacataaaagtaaatattcaaccattatttacattctaatgggctggctatgtctagttgccttcatgcctctctggtatgcgcttggtccagttggcttcggattgcttttactaggaggactttcctttactcttggcgccctcttttacagccggccaacggcatatacccatttgatttggcatatttttgtcctcatcggcacgatattaatgtacttttcaattcttttatacgtttagttcccattcttcaaaacgacaaattagctggtcatctttttcataattattgtggtttactaagtgccaacggtcataatcgatcgttggcatttttgtatctccaacaatttgcttatttatcaccgttcgtgttagctttgtcgccattgggagtaattgctgatagatcgttgccccaccgattacaaaatattcgtttggatttgctttaagatattctttaagggcagctaaagaatgaacgactttcactccttcagcatctatgttctgactggtaagcacaatattttctcgcttaggcaacggtttattgccaagagaagcaaaagtttttcgccccattataattgggtgaccagtagtttttgtcttaaaatgcttcatatcagcagaaacatgccacggaattgtattatctttgccaatccaaccattcaaatcttccgcccagattaaattcagttcactcattttgaaccactccttttaaactgctacgggagccttgattgccggctcataagtatagccttctaatttaatatcagtcatttcatattgatcgattggttttggttcagcaggtaaaatcaatttaggagcttcatgaggtgttcttgtcagctgttctttaacttgatcaaggtggttcagataaatgtgagcatcccctaatgtatgaacaaactcgccaggttctagaccacattgatgagcaatcatatgcgtcaataatgcataactagcgatattgaatggaactcctaaaaagatatcggcgctccgttgatagagctgacaactaagctttccatcattaacataaaattggaacattgtgtgacatggagggagagccatggaaggaacatcttctggattccaagctgaaacaatcatccgtcgtgaatctggagtagttttaatctgctggataacattagcaatttgatcaattgtgtcgccttgactcgtcttccattttcgccactgacttccataaacaagccctaaatcgccatacttttgggcaaaatcatcatcttcaagaattcgctgacaaaatgccttcttttcttggagatagacctgcttaaactctggatctttaagccagcggtgaccaaagtctgtcatatctgagccttgatattcagcactttccacccacttcttaaatgcccattcatcccaaatatgattcttgtgttgaagtaagaagcgaatgttagtgtcacctcgtaaaaaccatagtaattcactcttaatcaagccaaatgggactttcttggtagttaaaataggaaaacctttgcttaagtcaaaccgcatctgatatccgaaaacagacttagtaccagttcctgtccgatcacccttttgatgtccattcgtcaaaacataacgaattaagtctaagtattgctcttcatttatatttgttgccatccttatgttcccttcctttactcgtcaacgtatgtgcttaaatactcccaacgagctgtcttttcatcaattttttcttgtatttcatttagctgcttctgtaacttagcaattttcgtataatcgcttgctgcttcagccatttcattttctaattgctgatgctgttgatcaagggcgtctaattcttcatcaatatgatcccactcgagttgttcagcataagtaagttttgttttttcttttttggctggttcttgcttacttgcctgctttttagcaagggctttttgatcatttttaagctctttatccttatctgcttcttctttttagcagttaaataatcagtaaagcgtcccgtataacgctcaatatcaccatttccattgaagactagcaaattgtcggccactttatctaagaaataacgatcatgagaaaccgtaataacagttcccgcaaaattatctaggtaatcttcaagaactgtcagtgttccaatatcaaggtcgttagttggttcatctagtaataagacgttaggctgctgcattaagatttttaagaggtataatcgtcgcttttcacccccagaaagctttcggatcaaagtaccatgcataaagcgagggaataggaaacgttctaataattgggtaacgctaagcttattaccatctttatcagtaacattatctgcaatttcagacaagaaactaatcatccgcttatcattgtcaattccttctgtttgctgggtataatatcctaacttaacggtttcaccaatcttaaggacaccactatctagagggacacgttgggcaattacgtttaataaactcgtcttacctgccccgttttcaccagtaattccaattcgatcacctgcctgaacaagccaattgaagtcatggaggatttgatgattatcaaattttaagttagcatccttaaattgaataacatctttccctagacgttgtgatccaagattaatagcaatatcttcatcggttttaagattacctatttttccttctaattcgtggaaccgattgattcgccccttttgttttgtggaacgggcttttgcacctgtccgcatccaggctaattcttttttatacagctgttgattctttttctcagtatctttagctaattctactcgttccgccttttttgctacaaagtcctgataatttccctcgtagtgataaagtttaccaaaagatagttcccagatatgatttgtaatttgatcaaggaagtaccgatcgtgggtaacaacaaggacggcacccttataactacgaagaaaatcttggagccaaactaccgaatcgaggtctaagtggttagtcggttcatccagtaataagagatctggctgttgaattaagacttgtgctagcccaacccgtttcttttgtcctccagaaagttgagcaatcttttgacttacatcttttatctttaactgggtcagaatcgtcttcacccgactatctgcttcccatgcatcttcttgatccattcgtgcctgcatttttgtgtaacggtcgattgcttgtggatcttccgggtgcttcgtaaagcgttcaagcgccagctcatattggcgaatcgtttcaaacactggttgtttaccttcaaaaacagcttccatgattgttttattttcatcaagctctggttgctgctttaaataaccgatcgtataatcattgggtttagtgatctgaccgccaccttctgggtttacttccccactaattacgttaagaagacttgttttcccgcttccattaacaccaatcagtccaattcgatcattttcattgataataaacgaaatatcatcaaataaggtcttttcaccgtatgtgctggttaggccctctgcacgcattgtttgcatattatccctctttcgttatctcttctactttttctaataaggttgttgcatcgttagctatttcgccatttactactgccaacgttaattgctgaagaatcttccccatcaatggtcccggttttacccccgctttagtaattaatattcgaccatcaattgctaattctttagcgtttttaattggtaatttttgataagctttttgtaattcctcatcattaattgcccatccatataacttagctacttggttagcatcatggagggctgtttcaccggtattaaacattagtgttggcgtaagcgtacgttgacgaattgcttggactgctggaactacttttttgacctgcgcaattaaatcatttgctgtcttccacttctttaagaatttaccaatttctttttgatcaagctggagctgtaagctcaaaactgaccacaattgggcctcattttccaaatgccattggttaaggattaataaagccgataaagcagcttgcgcattttccaaccctggacaatattggtacaatccagtcgcaataaaatcttttaaacccgctactggattttgacccagcaatagtttttctagttcaacccggattcgttcaactgcaattttttctaataatggtgcattttctttaatcccttttaatgttgcagtatcaatgacaaaatcaagcttacttgcaaaacgcacggcccgcatcatccgtaaagcatcttcatgaaaacgttcattagggttgccaactgctttaataagatgtttttgcaaatcttctagtccgtcaaatagatcaataacttccccatcttcccgtaaggcgagggcattaattgtgaagtctcgacgctggagatcttcacttaatgaacgaacaaaagtcactttatcaggacggcggtagtcttggtaacctgactcggttctaaaagtagttgtttcatatcccgttccatggtcgagaatcataactgtaccatgttcaattccggtatcgacagtatggttaaaaatcgcctttatttcactagggtaagcactcgtcgctatatctatatcatgaatctcatcatgcaaaatagtgtcacggacacaaccgccaacaaaatatgcttcgtagccggcctcctctattttttgtaaaacagggcgtgctggttcaaatatagctggtaatttttttattttcatttaatcatgtcctcattttgataatcaaagttgattataacaaattaagttactactaaaaagagacaggaagcgtaaagaacggctaaaagcgttaacgtttcctgtctcatttaaattaaaaattatttgtaatcttcatattggtcataaagatcttgcatttcagtgtctgttgggactaaccagagatagtgttccaattcatccattaacttatcagtttcaccagtttcgcggtagtaattaattaattcttttaagaatgttggattttcactgtatgccggcaaagcagcttcataatattttccggctaattcaagctgatcagttcgttgatatgaccgcgctaggttccaatataattgtggatctgtttcatcttcttttaccaatggactcaggagcttaatgtttgcctcatcatcgtgttggtgaagcaagaaattactatattgtaaagtaatcgtcatattctctggagcaagttcatgcgcttttaccaagtatttcttcattaacttttggtcaccaaggtagctggtaatttcagctgctaatgaataaaggtattcattgtattgatcaacactgagcccttcttggataactcgtaatgcctgctgatacttattttccttttcatatgcctttgctagttcaggataagcagacgcatattggttatcatcattgataagatcctctaaggtttttattgccttttcagtatctcctaattgaagtcgggtcaaccccttttggaaacgaatatcactagtctggtattccggtttaacctgattgaagtaccctaaagccttcttaaactgaccgctctgagcgtaacaaatccctagacgtccagcgatatcaacttttgcaaagtcagtatacccatttttaattagttggaagtaatattggattgcttcagaatattggccaaccataaagtaaaattcaccaagcgcaaattcaacagctggttcatcgggagccaacgcgtaagcttcttttaacttttcctccgtcacttcaaattcttcttcggtttgatataagtccgcggcaaccagtaatgattgaacataagctggcgagtctggtttaatctgggctaagtatgataaagcttcgtcattatgtccttcatcaattgcaatcgtcgctaaattagtctttaattcatcttcatctggataacaatctaataattttaagtaaatcgttcgtgcctgttgaagaaagcccaatgcgtacaattcctccgcaaggctaaataacatatcatcatcatcattaattagtgcgagtttaaatgagttttgggcttcttttaattttcctgcttctaattgatcaagcatttgttctgagtaggtcatattatgccctccttttactatcacttttaaatatatcacaatcgatgattttaagcattgaacaagtctttaaaaagaaaagagactgggaagagtaaattctttcctagtctctttttaacatttaactgttaattacttaacagcgtcctttaaagctttaccaggcttgaatgctggtaccttgcttgcaggaatgttgatttcttctccagtttgtgggttgcggcccttacgtgcagcacgttgacgtacttcgaagttaccgaagccgatcaattgaaccttttcacccttagctaaagatgcttgaattgaactgaaaacagcatctacagctgcagtagcatccttcttggttaagccagttgcagtagcaacattgcttactaattctgctttgtttgccatgttgtttcacctcccacaaataacgagagtgttaaactcacgtctgtgaatgttaattttgagtggtccaaaattaacgaaataactacgagaagttcgtatcatttcattgttaagattagcatagtgaaagcctgctgacaagcggttttctcaacttctagccgcatttttaatgttttttcattttacaatgaattctttaacttttactgccgttgacgcttgattaaatggatcggtgtaccagaaaagtcaaatgccttccgaatttgattttccaaataacgctcataggagaagtgcattaactctggatcattaacaaagataacaaatgttggtggttcggttgcaacctgtgtcccatagtatactcgcaaacgccgaccattttgtgttggagtcggattggcaacaattgcatccattaaaacatcatttaagactgccgattggatccgttgacggtgatgttgatatacttcctcgatcaatcccggtaattgatttaaccgttgctttgtcttcgccgaaacgaaaataattggtgcataactgaggtactggaattcttgccgaatcagattagtaaaatctgtcatcgttcggtggtctttttcttttaatgtatcccacttattaacgacgataataaccccacatcctgcttcatgagcatatccagcaatgtgcttatctaattcacgaataccttcttctgcatttaggacaacaagtacaacatcactatcatcaattgctcgcatggaccgcatcaatgaataacgctcagtgttctcataaatttttccttttttgcggattccagcagtatcaaccattgtgaatttttgtccatctgctgtttcaaattgagtattaatggcatcacgggtagttccggcaacgttagatacaattacccggttctcacctagaattgcattaaccagtgatgatttccccacattaggacgcccgataaagctaaagtgaatggagtcatcttcatcattagctgcgttatcaggaaactctttaataacagcatccaaaagatcacccattccaataccgtgaacacttgaaactgcatacggttcacccagaccaagggaatagtaatcataaatatcactccgccgttctggattatcgactttattaacagctaagaccactggtttattggagcgatataaaattcgtgctacttgttcatcagcatcagttacaccattttctacatcggcaacgaagattattacatccgcttcatcaatagcaacttctgcttgttggcgaatctgtgtcaataatggttgatctgatatttcgatcccgccagtatcaatcatgctaaaatgtttccctaaccattcagcatgagcataaatacgatctcgagtaactccaggagtatcttcaacaattgaaatccgttctcccgcaatacgattgaataatgttgattttccaacgtttggacgaccaacaactgctacgattggatttgccaatctttccaccttctttcattttattttaaatgattaaagagggagtgggaaagaagtcgcttgcgacttcgttttcccaccctcgcgaggatggctaggcattccggacgttgatttatcaacgttcggaatccagccagctactgcgctactgtataaatacctttaaaaaaagtaaagagactgagttaattcccagcctccccttaaaagataattaatttaagaaactagttccgtaggtccttaagcttgtcaccaattaagtcacccattgagaagccactttcttcttctggagcgttgttcatgaagctccggttgttattgttacgacgtgaacgacgacgaccacggtagttttcaccgttgttattgttgttttcgtcttcctttggacgttcttcaagagccttcattgataaaccaagacgttggtgttcaggatcaacattgattaccttaacttgaacttcttgacctggcttaagaacatctgcaggtgtagcaatgtgcttgtgtgagatttgtgaaatgtgaactaaaccttcaacaccagggaatacttcaacgaaagcaccaaagctagtcaaacgcttaacagtaccagttaatacgctgtctactggagccttttcttcaatatcatcccatggtcctggtaaagtttgcttaatggataatgaaatccgttcacgttcagggtcaacgcttaataccttaaccttaacatcttgaccagcagtcaatacatcagaaggcttgtcaacgtgatcgtatgaaatttcagaaacgtgaaccaatccatcaacgccgccaaggtcaataaatgcaccgaagttagtcatccgtgcaactttaccttcaacaacatcgcctggttgtaattcagcaaataccttttcagcagccttttcgtgttgagcttgaatgatttccttgtgtgaaagaatcaaacggttttcgcttggttcgatttcaacaatcttgaattcaagttcttgacccttaaattgattaaggtcttcaacatagtgatcagtaatcattgaagcagggacgaagccacgaactccagcatcaacgactaatccacccttaacagcttgagtgaccttggcggtaatgtgttcaccttcatcaaatttcttttgaatgtcatcccataccttacgggcttcaagacgacggtgagaaagaaggtagctaccattttccttatcgttaccgatcttagaaatgacaactaagtctaattcgtcacctacttttacagcatcattgatgtcttcaactggcttggttgataattccttagcagggacgacaccttcaacccctgcatctttaataccaacgatagcttgacgatcgtcatcgattgccaaaacttcacccttgacaacatcgcccaccttaacttgttcaatgctatcaagcgcttctaacatatcgtttttattttcgttgttttcagccattaaaaaaaatcctccttgcaacaatcaactctaaaagatattttactaaaatttgtttcacatttccagtatttaggctaattcatcttgtgttttttttattattttactgatttcactcacaacttcatcaattgtcatatttgttgtatccaatttgattgcatcaggtgcttgtgtaagaggtgaaacttttcgcgttgagtcttttttatcccttaattcaattgctttttgtaattcttcaagcgatgttgtattaatcccttttgcttggttttcagcgtatcgccgtcgcgcccgttcataggcactcgctaccatgaatatctttacgggtgcttgtggtaaaacagttgtaccaatatcccgtccatccattacaattccaccattttcagcaatttgccgctgttgcttagtcatctcttcgcgaacagctggaactgccgccacagcagatacatttgctgctactttcggcaaccgaatatcatgagtcacctctttgccatccaagaaaactctttgttcagtttcaccaggttcaaaatctatttttatttgccgagcaatttcagcaacctttttatcatcttttggatcaatgccctggtttaatgctgctaatgtaacagctcggtacattgcgccggtatcacaatagacataattaaacttttttgctactaatttagcgaccgtactctttcctgctgaggccggaccatcaattgctacttgcaatcccttacacattattagttattcactcctctattttcaatccaatacactactctatcaaaaaattgctgctaatactctatttttaacgataacggtttgtattttctgtattattattgtagcgattataggtttggttattgttataacgctgctgataactactgtagcgattaggagtagtccggttttgatacccattaccataacgataactactactatatcgataataactactactgctttgcggagcactataactttggctggtttgtgtcgaacttgattcctcaatacttgaagaagaggattcactactgcttacactagattccttctttgaatgctcactagaggtactcgaactgtgagattctttttttttactattttcagaactagcaactacttgttcagttctcaccggatgattaaaggactgtttattattaatccaataaataagtggtgtagcggcgagaacgataattaatacgattaagatcgtagtaatcattgaattatgtgatcgttgcttacggtgttctgttcgtgataaatggccatcactatcaaggtcttcgttatctgtaaactttttatcccataattcatcattagctcgtcggctctctttccgttcctcactcaaagtaatcatgcctccttattttgagaattaacattctgattgtatcgcaaacttttgatgattgtctagcaacaacacgaaactttaattttcagtaatatttaacaggccctttaagcggtcttcccatcctactttattgttttcagaaagtggctgactgaccggcaaaatcagtttagttgcccaatctgaaagctcataatcacaacaaaattcattcgaaccggcaaattgctcaccaaaatatgttaaaagatattctcttttacaaccgtcctctttgatataagcaaccatttcttgcaattctttttctgtttgaattttgcgccgctcaaacatcgtaattatttgctgcggcgtaaaagaatgttcaagataaaacgcaaataaagacgcttgctcccccaaaacacttgctgacaacttgccattcttaatctgctctaaaattgtaactggcggaagatcaacgcttgttaattgtcgttgaatcatttcatcgccatttgcatatagaagaactgccaaactctgcttaccatcacgcccagctcgaccgatttcctgtaaataattctctaaattacttggcaaatgataatgaataacgtaacgaatatcatttttgtcaattcccatcccaaacgcactcgttgcacaaattacctgtaattcattattcataaattgattttgaattcgaaatcgttcaattggagcaacgccagcatgataagccgccacatttaaatcagtttggttttcaagccattctgccatctgagaagccagcttacgacttgcaaagtaaataatcccgggaccagtgaatttttgaactagtttcagaagttcaccatccttttccttttgagtagcgatggacttaacagctaaaaaaatgttaggacggtcaacagatttaattacctggtaggcagtcgtcatccccatttttttcaaaatgtcctgtcgaatacgaggagtagcagttgccgttaacagcaatgttgtcggcgatcctaattgctgccgcacttcctttagtaataaatattcaggacgaaaatcagggccccactgtgagatacaatgggcctcatcaataaccattaacgcaatcttatttttcttaagcgcggttaaaacttgctggttatcaagcatttccggagaagtaaatataaatttaaatgatttcaaattgtggaggacgcttgctcgctcttttccgacaagctggccgcttaacataatgactcgtttttctccctgccgatgaagacggtcaacctgatcctgcattagtgaaatcaacggtgaaacaatgaggatcgttcctgacaataaataagctggcaattgatataaaagggatttcccggcaccagtgggaagaatcgataaagtgtctttcccttccagtaaggcgttaattgtctcttcttggcctggacgaaaatcctcaaagccaaaatgattttgtaaaacatctagaatttcttgcttatttttcatttgttattccttgaaatatttgatataggcggtattcataaaaactggcaatttgctcgtcaaatttccatgcggtcggttcgcccttatagaatcgactaagttcgtcacgcttactctctggcaaaaggatatcccaatctagcttgtcaggaataaggattgccgcttccaagagatgctccctaattgtattttctttcaaccgtcgctcttgagcaatcagttcaattggctctccctgggtatataagtcaaacgttacttgggcactccggtttagtggactctcattgatcagcggaaggagcaattgttgcagtggaccaggaaaattacgagcataagcgctaaccgctaacatctcgtcatgacgtaagtactggatatcatcgatttttattttcaattcttgagctgcttgattaattgtccatcctgatcgctgataaccaatcatgatattaaaaaggtccgttgtcattcgtggatcttcactttccaaagcgctgccaaaccgatggagatcagtatagagatttttaaccagatcgtgatgataattttgtcgaaaccactgcttcaccgcaaccatttcaccatatgaaatcgccaatggaacatactttctttgatgataagagaattctgatacgacttgaatagctaaaaaaagtcgttggattattcgttgcgtattggttaaccagtaccagtcgtaaaacgatgggatgtagaaagtttcttcttcgttttttaaaactttcgcgccctcttctgtaagaattgcttgggattgatcatcaatcgctaatagtttatcagcaacaagttgattaataagctgatcatattcttgtcgattcagtgttcgatctgcccctaaccactctaagattccatactgtcgagcccaaaagagagttgcgactgttcgccgacttcgcagagtgttttcaattacacgaattcgccgtggctggtgatagctaaaaaagcgcaataatttattcacggatttcacccccctatatatttatatacgtaatttatttaaaaattctaccataaaaataaaaggccaagaaaaatctcagcctcttaatctatctttttaaatcattctatgctggtctagccatggactcaaccgacccgcgataattacatatacaattgtaacaaccaaacccttaataaggttaaaaggcaacacaccgatcgctactaattgagatacgggcaaagttgacttccagttccaaactgccatatataaaggggtaaggatccacaaattaagcagagacattaaaacagtcaacgttacggttcctaaagcaattccgataatagcttgtcttttattactccagttatgatgacgccatacccagcagaacggaagcagaagagcgagggatgaaataaagtcgctggtaaccccgattaattcagctggcgaaaagccatgaatcattccgtgaattaagcatttaattgcagcgataataattccgccaactggcccatagatatagccccctagcaaaacagggacatcagaaaagtccagtttaagatagggcgccatcggcaaaaccggaaactcaaaaaacattaaaataaatgctaaggcacctaaacaggctatgcctaccaatcgttgaatacgttgatgcgttactgtcattaataacaacctccatctgagattgtctccatttggcatcctgtattaaaaaagcgttgccgacttaccatttgtttgtcagcaacgcaaataaactatttaaagattatttaatacagaaatcttctttataccagactgtactgtcggctctggaattacaccagatcaaccattaacaatgggttgcgggctgtcaccgccggtcgggaatttcaccacgccttgaagacaaacgttttatatttttacaagtcctattctaataggcttttactgtcatgtcaacgtttatagcttggatctttttccatgttattccgcagtcttccatgacttttcatattttttgctatatttttgctatatatagcaaaaaattttggggttctcagaacatccaatcgaactttattttagatgttagtttctactattatatagtatctaaaaataaactatataccaaaacccttttaaaagaaattaattaataaattttgataaattatcaagatttattttttgttcatcaatttttctatatagaattttccggcccattaaactaaaataaacacgatataaatattctgttttgtttttcttaacaaactgtaatttaactttacttaagcttattctttcatttaaaaataaattcaaatgcattgacggagcattttttagaagttctatttctcctcctgggcatataccgttatatggttttctagcttctactccacaaccagtcctatgtttcataccctgcgcatcaacaatccaaccatcataatttagaggagttagacttgcgttgcataccgttattgtccacttttttaaaacaatattatagttaataacatatgatacgttaatttgttttttacgaagtccaagatacaatgctacaatcgctgaaaagactgtgcctattgcgctaaaccaatccgctagatttcccgtctccatccttttttctcctattatgcgttatattttacttaattaaacaaaaagcgccctgttaagcactcattataaaaaacaattataacaaaataagccctagggatcattacaaaaaaaatggtaacaatctctagggctaaattattattgacgttgtgagtaaacaactgaattgagttgttgctgattgacgccattagcaatgtcattagcaaattggttatagctaataccccaacttgctaagtatccgtatggatcaacatgtgagccaccaatattttcggttacccagttatgggtcttaacaccgggagttcctgcaccaccagcatcaagagttagcggaataccatattgcttagcgtagtaacgagcaacattgatgtaagcagtgtaatccttaatgaattggctacggttgtatgttcgccctaattcaatctgacacggactgtatggattagcatttaaagcaccccaagaaacataacccggttcaccgacttcaaagacttgaccaccatcgccgacaacaaattgggtataagctgattcccagttgttgtgaagatagttagcattggcagcggcacctgattcagcgccgacatcgtgcatgatgatgtagtcgttgatagctgattgactacttccctcccagctggcgaggtcgtaggtatgattgatttgtgatggtgtaaaggcattagtattttcagaagtcaaaacaccttgactatcagcgtgatacttcacgccgttaaccgtaatatcttgattagttactaaggcaccatcgcttccgaagtaataggtgttaccccagttttggtagaactggttagtatatcgcgctccatcagcgccaaaataataagtatgaccccaattgttatagaagcgattattccagcgagcaccgtcagaaccaaagtagtaagttcgtccccagttagtataaaactgattggtataacgcttgccatctttaccgaaatagtaggtattaccccagttgttatagaaatagttgcttacttgattaccattggcatcgtagtagtaagtcgctccgttccgggtatcgaaaccattgcggaccatttctccacctttaccaaagtaataagtgttaccatcaatcttttgtgctttattagttaatcggtaaccgtctttattgaagtaataaagattaccgtacttatacaaccaattatctttcaattgatgaccatcagcatttttccaagttaccgttgagccagcgtcattagcactattagcctctacggtagtagttgcacccactaaaaaagcactagcaatggttgccagtgctaagttcttagctttcttaagtgatttatttttcattattttttaccctccttggtagattgattaggaataaaactcttgccactaaagatagtcttgtctgtattcaatttaatggaaccgttagaaatagttgtctttacaccatcaactccaatttcaacagtactggtggttacttccccgttgccttcaacaaaaccacaaagccccagaatggttaggatcgtgttaatgatcgccgctacttggtcccagtggccatacgtaaagccaaaagccatcatgacttgttgaatgagcacaattaacagcgtaataaaagacgctacaaccgttttattgatcgtaccgtctggattaaaaaacttctttttaagcatttgttttaaattcatttatgactacctctttccaagtttgtaattcgacgctcgtgatctttcaattgctcgtcgtgatgaatgaacttcttgtctcctgcttgcaggcgttcattggctctttcatattgacgattagagacttccatattcttgttgagtttacttaactcatcataaattgggccaagaatatttttctcaatattatcaatggctttctttgaacgtttgcttagccatttaaatccggtaatgattatcccaatgatggttagaatggctacccaatcctctagcgagtagccgaaaatatagtgaattgctacccagtgcatttactcacctccattattgagcggcgctacttgccgacgtatcagaggtacttgctgaacttgcgctagtagctgggtcagcagaggttggagtatccgacttagtaggctcgcttgttgctggcttattacttgctggtgtattgctcttagcaggagtcgtaggtttgccagcctcttgaagttctttaaccgcagtttgtaaagcagtaatttgtgatttaatctcatctaaattcgttgaattttgcaaggtgttaacttgatctttcaagttgctaagatcttctgaattcttgttagcagaatcctgtaaagcctttaattcagttgagttatcgctggcagtttgtcgaagagcattaaattgttcaacagtgacaaatttagatgcatcagcgtccttccctgcttgtccttctgcaataactccggtatcagtattaccaatcatccagtgcttcgtctttggatcaattgaaggcgttaaaccgtcattcccgttaaggcctggaccaccaggagttcccggaagtccttgaataccttgttctccttgcattccttgtggcaattgtaagttcagagtataggtatttggatcgctttgtaatgggactaaggttgctgatggttgagcatctggtgacaacttggttaccgagccaatcacaatcttcggggtctttccaggatcacccttagcacctttagtcaaagttcccactttttgcataaccgcattccaaaaggcattaattgtcattgatggaatgttagttacatctgataccttcattgagttttcttcaatcgtaaattgagcaaatccttttgagggatagacagcatctttctgcgtgtcgttgctcatcgcccacaattcaacaatatagttgccaggggttaattgtttaacgtcttctgttttaagaatgacattcttatcttgaatatacccggtagccgtagcggcgaagtccttagggtgttctaagtcattgtttaaggtactggcaatcttgaacgttaatgtccgattggtaaagtcgggcacttggtcatcgtccaatgcagtgaaagtcattactgcatcagtgtcaccgaacttccagtcgccccacttttcatcaatggttagatctcgcatcttatctctcctttctattttctacgtagtttcttgcccagttcatagatagcgatggcaattgcatatccgacaacgtaggaacacaaaaatgctaaaagatttgccattatttccaccttccttaccgccaggagcagagccaaccgatttgaatatattctggatcaggcttagttgcatcgtaactatttgattggtggtgcatccagatttgaccactatcaccagtgttgtaatcaaacattaaaacattattttcattctgggctgtcaaacgtgggaaagcatagataccaccattcattgccgctttatcaacattaataacttccagcccttcgtaaggcttcattggtggaaaatcaaacgttccttcaagcttgcaataaccgacatacttattgaatttgataagcgtacatttaacatcatcatgagcacggcaaccgttaactccccatgctttgaaatcgtattgcttacctgattcatcatcggccaaactagcctttgccgcattgattgcattgttagcatagtcataagcaggctgtaaggcattgccacttaatttatcaatttgagtagtcccatgaaaggtattctgccccgtaaatgtattattaccacccaatgtagcaacttgattagtttgaatggatgataagacggcgttcagagattgtcttgcaatttttgccgcatcggttgtcccgctcagcatattttgaagttgacttgtaaaagacgcaactttttgctcaatctgagctagttggttatcaacgttgccgtcatagatttgtgaatcaccttgtgtcagatagcccacaccttgaataacgctaaacataacattaatggtcgaaataacttgatcgttgttgtctttaatgcggaaataggcacgatcatagtcaccgacccgctgatagaaagcgcctggaattgtaaagtctaacgtccctaatgacgggttaaccatcgtcatagtattaccgctaatcttagtctttccagcggagtcaactcccaccaagtcaagactacgattttccatattgaacggatgaccttgttgtccgaccatcacaaacttaactactcgcccattgtcgccctgatgaccattcatttcatcaattcgggtgactttatcagaagacatggttacatcaagaaccactcggccattgcgataagcttcatcgattgttgttgccattctttcactctccttttagtacttgattaagatactgaattaaattattgagggtagtttcaatttgtccccaattatcattgaccgctttcttgtagacatcgttagttgctaactgatctactctctgtaagttcagagtcggtgtagaatcgcctgtttgtggatcaacaatccaattagcattgcaaaccttaatcacatcattgacaacactttctaattgttgaaaagacgccaacacataattacgtaagcttcttgttaatgcattgcctggcattactaacgatatttgagttttttgcggatcagttcccataatcgtttcaagattgctataaagctcattaaccttaccaataacgttgtttgccccgttactcacgttagtgccaattccaaataaatcattaaggcgatcaattttaatttgatcgattaattttataactggcttatctggaacaacgggttgatccggtttgttgtctggctgattaggtttgtctggattagtaggggttgtaggattagttggcttgtcatcaggcttgcttggctcagttggtatatctttagcagttgatttaatataatcagctaatcgttgagccatctgcatttgagtatcgaagttcggatgcaaacagccatcgcctaacaccgttttataattctgtggtgtaacaattggatcttctcgccagtcgtaataatggtagccgttctcagttgcccaactcttgaatacgtccataacttggttttgtgtaattcctaactggttaggactgtcaagatttgttgcattattaatgaatgattcaatcatcagatcaactaatacataagctttactgcctgaaactgagaacatggaactgaacattgataatccagccttaagagcatctaagctttcacggttaagtccccaatcattagctccatagcccaatagaatatagtcatagtctgctaaattaactgttgagagcaaagaaaccatcgatttatcgccatcattaactgatgtggcactaacagctcgattatctacttgagcaccaattaactcaccaattttgtcaggaatagttggatctgctcttggatgagcatcaccgtatcctgtcactccccacataattgaatcacctaagcatagtaacttagccatctaattcacctacttttgttcggtatcagtagttgtcgtttccttaattgcagtatcttttgctaactttcgccgagcaattgttaccatgtcacccattgctacttgcataaatgtctttccttctggtaaatcgctagagttaacccgaattgaggcattaatatattcgcctgatgtaacttcatttccatataagccaatttgtgctgaagtgatttgtccattatcaaagttgtaagtgaagttgtttacttgtaattcattcatgattaattcctcctaaatttttgtattaaaaaggcccacagcttacttattagcttgtgggtcttgttctgtttttaaatcttgatcattttgagcaagttttgcttttgcttcgtccagttgtgattgcagactcttatttttcttaatctcatttgctaaattaacctgtaaaattgcaatatctcgttcttgattctttgaacgatcaagcaatacatcaataacatcatttgcgtttgcagttaaattatccattaatttgtacctctttttttatttcatctaattgtttctttaattcttgtactgcgcccatcaagtaaccaataacatcagcatcagatcggcctgtcctacgctcattaataaattcatcaggtgtactgtactgtgcaacatcatgcacatcatcaataattggaccagcatggcgtttagtcatgcctccggctacttctgccttatattggtaagtttctagatcagtttccatgatcttgtttagagcatccttagtatcaagcttttcaattcttgttttactggaaagagtcgattttgtggtccatcccatgccttcaacgtatccattgaaacttgcccacccaaagactcggaggtgaaccccagttgcattaccagtatcattaggattaccgatattaacttcaccgttatgcatataaatctgttgattaccaccttcaatgaaagtgtgatcattaccgtgaaccgtagcataatcgtttccacgtaattctgccttatcaggtcctaaaaataattgtgagttacccgcataaacatcaaatcggctgctagtgctaattgaaatacctttagatagattgttagaggcatttgaaccatcataaacatgaattcgatagtctttattcactccactatctgcagaaccgattgatataccacttgttgtcccgtctttaagatacgagttcatcaaactgtaactagtagaagcataaaatccagaatactgatctgttggactattagggttcgccataccatttgactttacagccagccgaacagtatcatcgtgcattgttagaattgaccccagctggttagaagaatgaatctcaaaaccaccttggtattgaagattgatagtgctctttatcttgtcctgatcatattgagcaataccggcgccaatagtcgcacgtgagccatttccatagaacgtcagcttatcagcatcaagttctgaaatagcggcactcggaataaaagcacgaccggaaaatacgactgatgaagcatcaaggtatagcttatttgactgaatcaacgtattgccagcagtcaaattaatttgagataacaagtcaccgctcttgacccgcaggttgatgtcgtcacgaagctgggtgatctcactctcggttgcaccctgcgaccatgcggaccatttacttccgtcgtactgacgactgtaatgcagattgtcacggtcagacacggcgtactggacgattcggctgtcatagccgggttcaacctgcacataccaccaataaccaccgggtggcagatttgatccgcctttgacgaaaatcttctgctgggtaacgacattgttcaaatcgacgctatccgtgctcttccataaagtcttgtccttcaagtcattaattgcaatctgggcatcgcctatcttactttggaaggtgtttgaaagctgggtaagcttactcgacgtatcgctttttagattagtaacgttgccttgaataccgtcgatgcttacttgaagattgctgatttgagtaacggttgctaaatcagacggagccggtgaccacggagttgcaacggaaccacgctccaacttaggacgccagaatgaaaatagcgttttggctgaagctctgaagaacacttgtacataatggcaatctttctgtgtatgaatcgtctgagtgtttttcgacctatcatcggtattagcaactactcgcatatggtcaagatagtgaggtgtcgtattattttgatccttgtattccacaatgaaagtatagatattattgtagctgccaccgcttgctaccgtgttgtaataagtttcaaaagagagcgtatagtcagtatctggttctacgggaagaaactgcgtagcgtctaagtcaccgttccccttcagctggtctaactgcattgcttttccatcacgaagagtaaagtttgacccccacacatctttaagtttagttagatcagtgctgctgaaatctgtagcttttagcaggttgataccgccaccgttattgctcttgatcttagtgtcaagatcggtagcagtgacattccactgatccttggtctgcttaaccagcgtctgggcatacgacatcgttgcatagcccttactatccaagatgttgttaacggtagtgccatcaaccttctgcttgatctcgttagccatgacatcaatccgtgagctgttctgtgaagccgtacccttaaccttgtcaacttcagtctggtcggcttttaagctaatctgcttgttggtctggtcaatggcggttgagtttttcttaattgaagcgatagcatcatcaggattgggggaataatcagattcaatattccctaactctaattgcggatgatggtaagttgtagtaaagttttttccttctatatttcccatatgtccggcgtacaaccaaacgctatagctcactccatctttaggaatcgtaaatgttgttgagtgtcgtcgaccatctgctgggaagactaaactaccaggtgcttctttatcaagagctgagttccaaatccgtattgaggcttctttgaccccattggtatttgtagcagaaacagaaaaagtatatgtttcaccaggagttaaatcccgataaatcacccgattacaccatgccggccgcgcatccgttgttttagactcaataacaatatctgttccgctatttggtattaaatttcgtccaccaatccttaacccattaaccttatccttcaacgtctggtactcaacagatgacaccttttgactaatctgatcagccattaccttttgttcggcgctgactttgctaacagttccctttacattatctacttcggacttgtcagctttacgcaacaacatatctttagtttgcagctgctcggtactcaaagaagcttgcttagtttttaagtcgccagttataccggaatacttactatcgaagttatttaccgtaatgttaagagtagctaattgattaccttgaccagtcaacgtatcatgaatgcctttagcgtcaatctgaatattttgaatattcttttgagcgtcactgagtaataattgcaaagaatctgccttttgcgtgaccttatcaatattgccttttgtatcagtcaattcgctggtatgttcagtagcggtttgctcaactttgcttaatcgaccatcgtgatctttaaactcactaactaacgaagtagatgttttttgcagactggaaatattccccttggcgtctgccatgtcatctttcaacgttttactgtcagcttgcaaggtatggatattcttgtcatgatcagcaattgtcaatttgatgccactaacatctttttgcagagcagcaatatcaccttgggcgttagataattgttctagtgtccctttggcatcttgcttgatctggtcaatatttccctgagcgtctttcaacgtagtaacaagattatcagcagtctgtttaacctgtgttaagttgccttgcagatcagataaagtagtcgactgttcagaagcggtttgttcaaccttacttagtcgtccgtttgcatcttccagtgtagagctgagttcctttgctgttgcggttagttgtgcaatatccttactatgatcagtcaaagtagcgttcaattgatcagcttgtgcttttacgcttgcaatattgccctgcgcatcttttagcccagccgacaagccatctactgtatcagatacctttgtaacgtcgcccttaacatcagcaattgtaatagaaaaaccatcctgattatcttggatggttttaatcgttttgccctgttcttgggcttctttggaataggtatctaattgtttagcaagatcgtcattagcctgttgagcagttacaatgtcttgacgactttgggcaatatcactattaatcttagtaacactgtcattaattagcttttgattctgctcaacagcggactgtgctttagttaagctatcatgaacattatctaggtccttttgcgctaaaccaatatcacttttaagcttatctacactagccgagttagcagcctttgccgtatcaacttcattttggacttgcgcaacgtctgctctaatttgtgcaacatcgctagctgcattagctttcaattgctgaatttccgccgtagcactatccattgcggactttgcttcaaccaccgctgaactctgtgcaacaatcgcatcactattgaccttacttgcagcgatggcggattcagcaaatttcacagcctcatcggcttgtttgcggacgtttggtaagtcggccgtagcagatttgatttcatctgctactttatgagccatattaggccacattctttcaccatcgtctttatcatataatcgcccaaacattgtgtctgttacatgaaaggttgctccattatcatatgagtatccacgtcctaagatgccagtttttgtatctcgtccaatttctccaacaataactttaactgtttgttggttggttttgcttgttttgttgctcgacgtattgctcaattcggtctgcctcctcccttgtaatagttagaatatttgttgactgatccggataagatggtgcttgtttaatcgaatcaatagccttcatcaaactcttattacgggcattttgataatctaaaatgttttgtgtatttgagttcaatgtaactgaggttggattacttacactaaacggataccagttaaaaccaacaactgcttcattagtggaaatttgttggtctcttactattatgtgaatcatatcgccagctattggcttgaaatttgtataagtagttacgtcaacagataatgccggattaggttgaatttttgtttttgcatattcaatcatggcatttttatcactaaaacgaccgtcttcaatcggctctgctggaaactctccatactttttaattgattcttcatcacgatacataaatggcgcaaagtaataatactcaatggatgatgaagtactgctactttggttactactatctcctgccgagccaccgctaccaacaatggtcgccatttgatcattgcgggcaacccagcttggataaaaccaactagcaggttcttccttacaaacttcaccaggttgtggttcgaagataatagtatttgcatctaaaaacaaggaaatatggtaagaacttccatgagcgccataaaaaccaacatctccagtttgcggagaactcacttcatgaaaatatggttccatagcgacagtctgagcaggcacatgaataccaaaatcttgataaacctgtgatatataagaagaacaatccattccattacgtggattacctcctcgtgcaccacctgcaccaccatacacgtatggaacacccaagtaagaacgcgcgtcatcaataacaccttgtgcacttttagtaacgtttgccgctggttgatcaccgtcactgtctgtatcagtatcaacttcggtttcaattgaatacttaccaccaatacacataacttcattcgttaagctagtagaatcaaacgtccacttaaactcggtagtgttataaagataatcaagtcgatttccgtaatctttattgaactgatcttgggtgtaaacccgaatgtttttattgtctgggtaaataatcgcattaggccagtgatcagtaattttgcttagcatatccgacccactaccatcactaagttgctctatacgtgacgatggaaaatcaccaataacttgatatgaaaacccaagattgttgccgtctagccaatatttcaaaacatcatcgattttgtaagaaatttgattttcgtcagagtcatctttggtttcatcggtcttggtaacagtcgttgtggtggtagtatcgccattttttgattgagatgaagttttttgtgcattagaatcactatcatcactgctatcgtcattgccattatctacttgtgttccaccgttaactcttacatctgtttgcttatcattatcttgtgggtccacataagtcttatacttgcgaattcgtccaacttcaaaataaacatgagtagctaccacatctaacgagttttgtccagagttagcgtctggttctgcttgtttgatgatatattcttgaccatcaaaaaagacggacgcttgactatccaacattgaataggccaaggagccgtcttgataagcagtaaattgtaaactccaagttgaattaacttcccatgtaatgtaaaagctatctggatcaacacaattaagaggttcaatttcggtgcgtccttgtcctcttactgttattttttgagtaattccaggtctcatagataaataaaaggaaaactgaaagtaatatctatgctgttggcaccggtaacagcaatattattccagccagtatctaaaataaggtttccgtaatcagtattagcacttgctggttgtccattaagtgttgtgttaattccattaagaattattgtttctgatccatttgaggatttttgatattcccactcacttccgttagttgaatttgtaattttcatcgaatttccattaaagtgacaaacgacttgtaagtcatgcttttgtccatacggatcaattgcaatatcacttggattaaaaacttgaaaactactggtagtaaagtgataaacaggagcatggtctaaccccaattctccaaattgaacagagcccgaagaaaagtcatataaagagttgctacgatataacgaatagcgatatcctgatggattgtcaaagttcattgtaattaacgcatcatgagcataatcttgactaggctttatttcgggtaaattggggtaaacaaaacggacaatggaagattccacgtccgttctcattctaattaatttacgttgcccgaagattcgataaaattgatgtttagcaagtttgaagtcttgccaatcagaaaatctcaaaaagaaatttgcaacaatctggtatcgagaaaatgttgaatattgaaattgacttccatctactccagcaatatcaagaaatgaattattaattactggagttgaattatctcctagatatcttaggccttgaaccttatcagcaatattaaattcatttccatcaccaatttttagatataattgaggattttgcaccagataatccacctcctaatagctcatataatcatttaacttctgatctttaccataactactataaaattgtgctcgtttacgccgtgcacttatattatcgctaccattagccaaaatagcatcgatttgttgtttatttaggccaacaatctgcgctaagaaagtaacagcttgtttaagataagcagtagtttcatcattagattgactttgcactcgccgactacgtaaaccaccagttccgccgctatcttgttccatcttatcaagagtatgatcaatcaaagataaagcacgcggacgtttattaacatctagcggaatgatggcttctgggagtccttcttcggcaacttcatatagtccatgtttagtggcaaaaccgccagttgcccatccatgacccataccgacgttgccccaacctccttcaccgccatgttcaagaacattaatagctgctagaatttgatcatatccgctcgcacgatttttatgtccaggcaacgcatcagcattccaggtgcttaaagcaaattgcaaaagacctagtgattcgtttccaccagagtttttatcatgtacttgctgtggaatcgttgggttaccacctgattcagtctcaatttgtttcaacaacttattaactttccattcagctgcatcatagcctaatgcatggaaagcacgaataatatatggacgccaacgtgctacgccagcaccacccggattagcctcagacgccatttgatctttcaaaacattagaaatagcttttgcaaatgcaatagcagaagctggtcctaggtcggctacaagtggaactcttgaattccagttagtcattttaaggatcaatgttttagcagcttcctctggatgtttttcaaattgctcagataacttatccatttctgattcggataatgtcccattagcatatttatgaaccccaattgaattcataaatttataagtactttcaccgctcaatacttgtgtaccgcgtggagcgtttggaatgagggtatttcgatgctggggaagtaacgcttgaccattagggaatagtacaagttctttccaatgaggacgaactgaatcattgacaagcatatgaccacccggatgtccgccgttagtaccgttagcataagaaatagtagataatttcttgtcaccaccaaagttgctgatagttgagttgataccgctaatccctttgttcaagcgactaataatatctttcattgatgattgagcatatccagggagtttatcaaatcctttacggaaattacttacaacatcatcaatccaactatcccagcctttaagaaatgaactactaaacttagaacgagtactttgaatatcatcaagatacctatctacagaacgactagcagatcctaaatttcgacttactggacgatctaatccagaccaggtacttctccaatcgcgatcaaattcacgcttaaatgaacgtaatgcacgatccattgaacgtgtttgacgattaaattcattaacaaagccagacttcttaccgctcatcgccttgttagcaatattagcctgttgagcaataagtcggccaaatggattcttacgaatggtacggtaaagattacgaatatcagaatttagcgcagtaaaacctgtcttctttccatttaaccctcttacggatttttgcaatgtattaaatgaacctgctaaagatttaagcggttttgctaatgaacgccaatatttcgccgagtttttaacactcttatccattctagttaaataagtagtaacttttgatttttttagatctccagctaacttcttaatgtaagcacctattttttgtttcttaagagcattatttagatctgtaaatcctttcttggtagcttcaagtccattctttccaactaatgttttagttgcattttgtagcgtcttaaaagattttgataatgacttaacaggtgaagcaaattctttccacttttttgtagaatcttttatttcactactaatctttttaaggggtttctccaaagaattattctttaagctcttacccagactatcaatgttttttataaggcttttaccgtactttttaacagtcccatctagtttaggtaagtcatcattaaatgctgcaaaagcatcctttttagccattgagttagtaaaccgactaaggtatttaaaagcatccccaatttccttaatcggtttagcaaccttcccccaattacttgaagcaccttttaattcagagttcatatgacgaagttcagaagttggatcattagttttaataacaccctttaaccctttcaacgttttttcatatgaacctatttgagccgtcatagcttttaagttttgtacgtcagacttagagtagcgagtgtttcctaaagacttaactttattttctgacgtcgacttatgagtgtcagtggtagaagaaactgattgtttgcgagttggcttgtgaattgtttctttctgacgatttttcccaaaccaatcgaagaatccacgccaatcatctttaactcctttaatcactgaacgagcatctctacccatatcagatttccagcgtttcacattcaatgtgcctaaatcagcaatggtatcccacatttcctttaagccagcatggacatttctagcaaagaactttaatgtagcaaatgctgtattaaatgttccacgttcccatcggaaataacctgctataactgggtgtttcttttcaattgctgcaatccaattattatattttcgcgtagcatccttaaaatcccagccaacagtagccacaaatccacgaggtttatagtttttggtataaccattccaccccttcttaaatgaatcagtagttttgtaagcccaatccgttcctaatgatgctagctgaccaccaaatggtcccgccaaataccaaccgatcccttctgccattgacttaccagcatccttataacgacttttcgcttttgaatttgttaaaccagaataaatattcttggataaatctaaggcggttaatgctaccatgccaaagtctataattgacccaaaaatacccgctttttttattaagtttggtaacgatttaaatttacttaaaaatcctgttgaagctttagcaccagctttttctccaccctttttaccaaaatcggaaagaacattagaaaaccacctagaaattctcgatgatcttgtttcgtcaaggtacggtctgatctgaacatctctttcagccttttcaattttacttgcagcgcctttttctttagaaggtatttctatagcgttgccaatagctgaatctccaccagaaaccaagttatgttctttccaaagtgcaacatttcgttcaagctcatgattttcaagcttaattttatcgttttccttattaatccggaacaaacttaaaaagtcttgtttcagagcacttaaaccattaactgttcctttaagaatcttaaaggctgtaactagaccaattactccaccggttacttctcctaagtatttaggaaagtttatgtttcgttgccttattccaagtgctttttctacattttttgtaagcagaccaattgcttctccaactgctccaattgcatggacaacaattccactaatcttaaagactgcagtaaagccttcaacaaagccaccagtaaatgaaaagattgatttagaattatgactaataacacgtgcaaaattagaaacacttttactaaagtcaccaatcgctctttgaccatcttttgagccaacccaattactcatagcctttgctacatcattaacagctggaagaagcttattgccaagattaattgcaatatcttgaatattcatcttaagctgttgcatctgcattttagtagattgcatgtttctttgtgccaactgatgaacataattggtcttttcagccttttcttccttttgaataagatcatccatcgcattagcactttgagataaaatcattgcagcattttgtcccgttgttccaaacacagctttaaaaaatgctccacgatcggctttactgagattttcagtatgcttattgataactttcataatatcaggaagctgctttaaagcacctttctttgtcttaaagtcatccatcgtcataccatactttttaagagcctctgttgcgccagcagtaggcgatagtaaactgttaagcacttttcgtaatccagtaccagcgattgatccttctaatcctgcattactcaattcacctaaagcagctgtagtagtttcaatggactgaccagattggcttgcagaagctgatacataatgcatagcctctcccatattcttaaagtctgtagccgtcatatcagctgcataggccatagcattagttactcgctttgaattttgaataacttgttcagatgttttaccttgccgtagattaaacgcatctaatacattagaaacattttgtacaacatccccataatcatctccagatgcacgagctgcctctaacatagatttcattgaaccaattgactgtcccgcagaataaccacgttttacaagctctgtgtactgatctgcaatatctttttgtgagtaaccatattctttagagaatttagcagcatcacgttgcattgtgcctacttttctaacttcactcgcagcttcacttgctgatttagcaccaaatttaagtaaatttccagtagtaacccacgattgttgtaaattagcggacatttgtactgatttaccaacagcagcaccaaatggaacaagcgccattgatgcagtcataattccaccacgtaatgattgagcccattctctcgtatgtgaagtagctcgacgcgcattggtatcaagattattcattgcacggcttagacgagaaattccgctatcagtgacgcttagttctgctcgtgaaatttcgttgattgaagttcgtaccttcaatgcttgagtaatttgctttgcatattctgaatttgcattagtaatcttttcactgagcccaactaaagcagctgcttcttttctatattcactagatgcttttccatgttcacgtacagtttgattaacttttgcttgttgctgagaatagctattacgtagtccatttactttagactgtaggcgatttgtttcactgacttctgctcgaaattggttaattaatgctccatgctgtaacttgtaggattctacttgagctttagctgtacgaaaagcatttccttgactattaactgatctaacataaccatccattactgatttaacactttgcgcttctgtacgtgtacgagctagaccagtattaaattggagaatggactttcgagactcttcaatcccttgagttaatttgttaatttgatgttgagcattttcaatctgacgagcggtactagcatacttcttttcagtttcgtcaaaagcacgttgaactttttgggcttcttccgaattagcatcagcatactttttcgtctcttcaatttgcttttcacgtgctttagaaagtttttctagttctccacgaagttctttctgtatatttttataattttcaatctgtcgctcagattgttcaatcttaaaattatatgcagaaattgaaccttcaccttgtcgaattgtttcaaatccggcacgcatttcagctttcattgcacttgcggcacttcgcatttggcgcaaactagctacaacaccacgatcttgcatatcaacggcaaatgtatacccttcaattacagacatctattttcctcctttcctcaaaattttttagaatgtaaaggcatctgagccaaccaaagttaatggatcttgcggacgatcctttcttgatttagcattttgtgctgccatcacatcgctaaatgatgatttataaaaatcactaggaagaataccgttactcatggcttcttgggccataaagtcgatatcttcggtgagattgtctaaatcaagaactaatcttcggaattttgttttgggtcttcagcacttaaagcttgcattgcttgttcttgacgcttttgcatttcacgaacacttggagtagtcataccagtaaattcgttaacagcagttgaatagaaagtaaataagtcgttgtatgacatatcttctagcttctttgcgtcatccttgctaaggtctaataacttagcaacttgcttaattacttcatcagtaattacttcgttatattcagcaaaaaggactgtttctttcttttggtcaagagcatcaattcgcttgtaaatttgcttaattccctcattgattttcttgatgtttcccattgagtccataattgtgaaatctttaccaagtacgttagttgcctttaatgttactgtttttgccattgttaaaactccttctatatttaagtctatgtattagttacgtctcactattactcgtctctgttatttctttttaagcggtagttgagctaccgtctggattaattacttcagtgggcgccccactcggttgtggggttgctattttcccacgccagctgccttctcaccatcagttcggacatcaactacttgacctccatgtaataaaggatcaagagtaccatccttacttgccgtcacaaaggtttgtccagggaagacagtatcgaaaagcttttgcttatcaaaaccatctcgtccggcacgatcaaagccgtagttctttccattaaagtaagagtaccccatggaagtgaacgttaaggtatcactttcacgagtttcagctgtatctgtgttggtttgaacgttttgcgtcgtttcagtaaagatacccattccaaaactgtaataaacatcttccaatgttaccggaacttgagaaacaatcatcaatcccgcataggtaggcttatcagagtcgacccaaataccactggaaagttgttggcgaccaagcagtttttgcttaacttccggattaattaagttagctgtaattgcaacagttggtgaagaaggtggattagaaatatctaccacttcattgttaccgttaatctttgttggtgttccagaaagcgctgaaatattagcagtttgcgcacctaagttaaggtgtgacttattggtatcaattgcgtaaacaccagcttcagaaaggcctttagttgcatctacaatggtggttccatcttcgttcttcaatgcaacgtagagcattttaagaccgatattagccattagttgtcctcctctgtaagttcgttttgtgtgtagttgaatttcaacgtattcgttatgttttttgtatctggagtcaaaacgtgaccagtgttgagataacgacggattttgtgagcatacaaaaaggactcaactgatttttcaattgagtccatatctccgacatagttaatcgggtagtaaaacataattgatattcgctttatagtcgaaagaattgtgtcatttcccacgtcacgttgaccgtcattatcttctgaaacaaccaaaattggatgtgtattatcaacgttttcttcgtcaatcatgtaggcacaaatattgtcgacaaggatatcttccaagccgtcagcattatcacttaacaagcccactattcgagcggtaggagtcattttacttgcctaccttttcatccatgatttcttttgctcgttcagccatacgtttacccatttcatggtcacgttccttaccaatgcgagcaataaagtcgtgccactcactatatttagtctttggtgccgtaccgtaaggaccaccgtattggtttcgtggcttccaaccatcattcaaaaaacgagcgatataagctttcttccctttcttagagaagccaatctcataatgcccgtcttctttaatttcatgtgttagtgtatccgccaaatgctgtgtaccgtttttatacacaacgtctcgtttgtgttgtttcaaaaacgcatccatagcgtcttcgtaaaccttatctccaaccttatttactttctttcgttcgctaagagtaaaaccttgatctactctttccaaaaatttatcaaaattatcgttaattaaaccactagccatggtcaagaacctcccgatgacaagtaattaaatcaaatccgtcagtgctcagaccgtcatcataagaaatgttatcaataacaaagatttcgtcccctttacggattttataattacttgtgatttttaagtcatgacgaacgaagaacacaacagcctctttgatatgtgcccctgctagtgttattgcttggttggcacttaacgtccataacccggcatatctactaaagtgtgggttgaaacctttgattgatttccccgtatttggattcttttttccggtgggttcgtcaataccaaattccaaacggtaacgcattctggcaacatttacgtttttaaccattgtgatcatcctcttgtgttagattgctgtcccggtcggaatctgccgctgtttcattactactctcggcgtctgcgataccagaagtatagtcatctaaccatccgtcttttttagcgatttggtagcgataatcatctttcattgaattaattaatgaatacagagccattggaacctcaaaagtttgctgttcactagtagcacttcgatggttataaagatgagaaacttcaagaataacagcggcattaaatacctcgttatcatcaaaaaaatcatcaatacgttcacctacttggccgataatatcccgtcgagctgccttaataagcatttttaacagcacattatcgctttccatatcaggttctagtcgaagagaagttttaacttggcccagatcatcatcgcttactgtattctttaataattcgattgacatatatatcaccaccttttattgctacttattaaccaatgctaataagtcaggcttacttgcagatgacgcataactaatcttatgtgcatctaagtaggccttaatttctggaatagtttgattttcagttggttttacatccccattaggattgaaagtatcagctactgccggttgtgcggaagcagctgacttatcagttgaagaactatcgcttgtagtcgagcttgatggagctgaacttgctacagcactagatgcaggtttgttttgactctcatttgtgtccccacctgttttcggcgttgatggggttgtgttcttcccatcatcaccggatggggaagctattttgacgcttgtacgtcagcaatacggaatgcgcttgaaagcttaatttggtgatccatccatgcagttaagacaaacttttcaataccagtgtcaacgtccttgtcttggtcatagatagtattgatatcgtagttgtattgtgagtatgagaagtcacctacaactggcttagtagctgcatcagtaaatactactggcttacccaaaacagctgatggttgtgcaccgtataaagtgttagaaccgttagcaagagtcttaatgatcttcaagtaatctttgtatgccatcacaatagttgcattttcacggtaatcttcgtgaagatcagcaaccgcattagtaatcgcatcgtaaagatcagaaccagttaccttcttgataccaacagtgtcatcgtagaatgacatgtgcttttcattagctttaattgggttaacagcaaaggctacgttacgttccttccgagttacaccattagtaagttcttgttctacgtaagctgttaagttagcgtctgagccaagtaatacagtttcagaaagtccaaccttaactttgaacttgttacgggtaaattgaacagtgtcacccttagcttgaatttccttagcggtgtcaccatctgcaataaatccatcatcatctaaagtgaatgagagacgaggaatttctagattagtaatttgagtaacggttgaaatatcacgtaatggattatgttcttgtggtcccgtaataatatcggttgaaacagtcttaggtaagaacttattaccaccagttgaatcatcatcacctaaagcttggtacacagatgctggtacagcttgctttgccatagtattacgaaccaattgagcaaatgccttcgcacgcttttccttttcagataattgacttggttcactattaggttttaacttcttcttagcctctgcttctgccttttccatttgcttacgagcaacctcataacgttcttgggcagaatcaacgaccttttgttgagccttaatatcttccgttggagtttgcgggttagcaagcatttcgtttaatttttcattggcttggcgaacttcatcccccatatccatggcgtttttcttaatttggtaaaaattcatgtatttgttcctccttcattgtttgcaattcgttattaattgcctttaagttgttctggtatcgttcaagaagttgcttacgaaatacttcatcgtcttcttgaacctttgcttgttgtttttgaaccgaagcttgaataagctgttcagggacgtgccgataacgttgagcaaaatttttgctaatcgaagcagcagccttattaggctcaataacttcggttgcaagcccgtattcaacggcttctttagctgttaaccacgtctcatcatccattaattgacgtaaagtggcttcatcgagcttgtcacctgctgtatcgagatacgtttgaatacttgattcagtgatcttgtcgagatcatctgcttgcttgcgtaattcagaagcgtttccgactgccatcgtccaagggttatgaatcattaacattgaatttgagggcataaaaatagcgtcaccgctcattgcgataacgcttgctattgacgccgctaaaccatctacatagacgtttatgtgcgctttattctgtttcaacatgttataaatagcgattccttcaaaaacagaaccacctggcgaattaatatgtaaattaattgtctttacatcacccagatcttttaatgcatcccgaaaacctgccgcagaggtatcagtgtcgtaatattcgtcagttacgatttcgccgtcgatatacattgacgctgttttctgcttgctttcctgctttactgtcagatatttgggaatcactgttgtctgtggcatcattgtcacctcctttcaaagtactttttttgctgttacgatctgcaatatccgtatcaattgggtataaatcaccagtaatccataatttatccgcatttttagcgtctgatggtggtaattcttccaattttcgtaaatcgttagcagatgcgatcccattccggatcagcgtttggtagaacgctgtccgtgaagaggtatcaccacgaagcaaaccgttaatattgaacttgaaatagattccttgagatcgttccatattactaagcaatttacggttaaactccgattcgtattgcgtcacaattggaattaacgtcatttcaacaaattgcagcatgacttgttcatttgactttccgttgccactctccagtgattcattcaaaaatgataagggtacattaaaggcagtcgctacccttgaacgagtgattgagttcgttgttgatagatcacttggttggaagttactatcaaaacgattgatctcaaaccctttttcttggacgactgccccaccgttttctgtaatcattcgtctaaaatcattaattaacgcttgtcgattatcaggactaaccgaacgatcatattgaatgatatatgcatcttttttatccatttcgtttaacgagaagtcttcaactgcttttttgaactttaatggtccttttaacacatccaatggcgaaataccaagtgtccccgttaatggggtaatgtgtttgacgtgaataatatcggtattaaagactaagaaatggtactctgtgctgttaacgtcataccaaatagaattgtcatcaacatttcgtttaacagtaattgcacccggatcaattggccacaaattaattggggcaccattatcgtcacgttcaatccatgcataagcattcccgtccgtattccgcgatacttctaattgattaatgagttggaatgctgacatcgaaggattagcttcaccatgcaataaatcagatgcaggagtgttgatttggtcgtattccttgtattcatggatcggcaaacttgataacgtgttagctaaacgactaataactccaaagacttcttcattattgcgcaatatattgttatgagttccaaaaaagttactgttagcccagttactaaaatgaaagccttgcccttcccaatcaccagaacttgccttttgctgtggatcagtcgaaaataaatgttttacgttattccaaaatcccatatttgcacctcctttccgctaattcagttaacttacttttccctcatcattgcaactaaggcataaataccaataattgcaaataccattagcaaaaataaaaaccatagtccaagaacaataatcaaaggtgtaaaaatcactaaccatgagcaagtgactagcccagctaactttgcactaaataaaaaagccgttaaagcaacggcaaaccatactaataatttcatttcttcacctacttgaatgaaataaacgttgagaccggaccgtcataagttggttctactaacatatcaatcactgatacatgcgcatctagtgctgccgcaaatccatcaatttttcgtgattgtgatgtttttgtaggcaaccaattatcattacgatcttggcggagatggacattatttaggtaccacttaaacatcgattgttcattaaatacgaccttcccgtctaaaagaagttctttgaaattctggagcggtcctcccaaagttttaaagccttgtcgagctacctctgtattaaaaccagcttcaatcagttctttattaagccgaatagccttagcataatcgtatcgaattattacgatgttgtatttttccgattgttccttgaaccaatcaagcacgtatgaataatcgacatagtctccaggaataattgtaatatccccatcttgttcccacttcctaattcgttctggattcttatcacgttcataccgagcatgtggaatccacgaatgttccaatataaaaacgccaccatcatctaaaggaaattctaagcatgcggaggtgaagtcctcagtatctgatagatcatatccacctacgcattcacgacctaaaagttccttcaaatcaaggtgacgcttatttttttgtagtatttcaggagttatgaagcttaactcatcaacttccgagaaaatattgaattgtttagtaatccaatcagctaattcgttagggactcgccgattctttttgaaatcagtgattagtccagcaatatccatcatacagatgttgggatttgccttgacccatagcgaaggatcattcatttcttctttctcgtctagcgatgcgagataataaaatgttcgctcatcaatgtctgaatcataatttttaagggtatcgtggccctgatcaatcatatccactaatgggccatctaaaacatacccagctgtcgtaatatagacgattaacggttgcttccgggtaccacgtgaccgtttcatgacgttaattaaagaataatcttcatattcatgaatttcatcaaacaccccaaaatgaagattttccccatctttgttattcttttcagctgacattgcaacaatcttactgttagtttcaggaaagcgaatttcagagcgattaggaacaaattttttcgataaccaaggcgatgcagtaatcatgttacgggcttcttcgtacaaaatacttgcttgtttttgtgagttagctaaaaagtaaacattcgcaccgttttcatggtcaaaaccagccatgtagtctgcaattcctgattccaaagtggttttcccattcttccgaccaaggaaaactagggcttcacggtatcttcgcaagccagtgtttttatcaacccaaccaaagattgagccgacaaagaaatgctgccaaggttgcaaaactaatcgcttgtaatcaccttttgatggcttacatttcttttcaatgaatcggattgggcgccacgctttttcttcatcgaaagcccaaggatagtcaggatcttcttgcgaacgttttaagtcttttagatgacgttcacaggctaattttacccactttccggtagtgatatcgccatttaccactaattcagcatagatagtggttaaaagaataggggctggttgttccaatacgtgtcccaggtccttttcgtgttgaacgtactcttttgaccattcaacaacaccagaataattaaggcctagcggattttcttttagaatattagaactcatcgtcatcttcttcattttgattatctgtcatgttaatagctaatgatgctcgggccgcaggattaagtccgaggttcttcgctagcttatccagttctgccgaaatttgcagtttcagtcgtaaatctggattaggtttgccttctacgaatcgaccatttcgttttagccgtgcattacacgatttgtattctttcgttaagtcacaataacgtgcaatttcgtcaatatcagcctcgttcatcaaatcagtatccttgaatagcttaataattgctcggaactgttttttggctccaggatcaagataagatggtggatccatatgttcagcagaaacttttaatttttgctcatttttcgcacgccgttctaactcatcttttggcttatgattgtagttaccatttgcaactaattgaagaacatttttagctgtttgtggcatatcaaaacttcctcctttcaccgaaatttagcgcttgacgctatttttagttatgttatgatttagttgaaatatgagtggtcaaaattaacggacatccggtgatgggtgtccgcttttttgtgtgcaaaaaattttgaaaaacgagttttttacgaagtaaggcatggcatcgctccagtgattttaaaattttctattttttaggggtggggggcttgtttttgcactttttgcacacgaaaattatttatttttactttcagaccgctttaatcgttgctgtgacggcgtttataggcatgtgcgcttttgggttaaagctccggattggctttgaatgtaaaaatatcactgttcttttcggcttttagtttggtctgcttatcgtgtagcgactttgtacgttcgttgtgttcggcattgtggcaagctttgcagatagtctctaagttgttagggtctagccgtttgctatagtcaacccttaccgctttaatatggtgtactgttgtagctggtgttattcgccccgctcgcttgcacacctgacacaaataattatcacgctgtaacacttgttgtcttactgcttgccattctttcgaatgataaaatgcgttgtaattatctttatatttgtgttccatctactccccttctaacgctttaattaagttattaatcttttctgttaacttgctactgtattgccttatacgtcatcacatcgcaatataaagcaagccaaaataaaaaggcgctaccgtttgaggtaacaccttattaattcgtttctttcgacaatatcaatataacactaaaagcccctttatttttccgcattttttccgcgaggatttaaaacaaaaaagccacctacctaattaatagatagatggcatatataaataatagtattctattgcttgtttagttcttctcgtctgatatgtataagcttctccagttcgtcaagtccttcattatctgcatactgtttaatatatcgccgtgcatatgatcgcgcttgatatgcttttgctgcttccgggtgctttgctttatatttggccgttgcctttgcttgtgcttttgtaattgccatacttgcacaacctcccgcaaataatatataatatatatgtattcaaaaagggcaagcgttgcaccgcccaccccttttgctgacccaatatcaggaagccgttttattaggtgttagccgtaaaggttaacgccttttttgttggtcacggtatatctgatataatactaaacattcatctagtatcaatttcagatatgcgatccagtcgccggagctcacggcgcccgccctcctgaaattaggacttcagcaagtgaactattggccattagtttcacccgcctagaattccgcaacgctttctacttttcccaatatcagatctgtgttaattggccgttgctccgtaccactcaacaactatattatataacatatacatagaaagtaaatacattttaataaattagttcaaataaaaaagtcgcccgattaggcggcttcttttgtttctgtgtgcttgttgttgtcatccccgacaactatttttatattaactcccagcccgttcaaacggtcaacggttgaagctaacaacttcatcagtacacttttataatcgtcacggcttgcaaagtaacggcgcttgtagtcatctccaggatcaacaaacttcaaagcgtgactcttaacagtccgataatatgttttatagttcattgtatgcatccccttagtactttagtaggtaattaattgcgttgttaagtattgcttgttgtgcttgcttgttttcgccgttgtgaatgctttgagctagttcttcaaatagtatccccattatttgaactgttttaggttctaacccttcacagtaaccaccaacaaaacgggcgtatatctttgttgctgttattctgtttattgacggcgttaaattacagcaaagaacaaaccgccaatagttccgcctgaatgctcggcgctcgtgtgtatatacggcgtcactttcatataaagccctcataattcgcgtggcttccatcaagtaaagtcttactttatcatctgtatctaatagcgttaatgctttaattgttaaatctgagtaacttaactttgtaatatccatcatgttcaaccccttttataacttcccttctagttggctgtagttgtgcgcttgtccgtttttggaacatttacaatttctaacccttgcgcgccgtcccttgctgtgcgatcattttttcattcttcttgttcgggtaaactgttagagtataatcaccgtcgccatcgtcttcatagtcgattgtaaatttatcatttttaatttgttggccgtccttaatatgggtctgtgagtcctttaattccttgttttggtctgttaaatcgtcattagttgcactgaggtcttctacttgtgcggttgccttactcttggccgtttgttctgttctaatttggttctgtgcgtcgtgaagcttttggctgtcaacgtaccagttagcaactgcaataattaataaaatgcctaatactttaataattgaattcttattcatagtgattacctctttcgttagttgtttttctttaatatgcttttaaatagtcgtgtaagtctgttccatctgtattttctagtgcttcatgtgacgtgtgaaaattacactcacataaatactcaagaattcttttccctaatcgattgtttttgttttgcatatagaccaaacctaaaagcgcgtatctgtcggcggtaatgctccaatcatataaacaggctacttcttggattgttctatcactttctagatagttaaaaaattcttcttgttcgctgttaattttgatttccatagtatctacctcattattggttagttttcttttactgataatttatatagtttgttccaaaactcgcgatattttcgcccgcctagttgcttataggcctgatgtacagtgattttattttcttgatacaacttgatatacttttctacttttcgcattgcttacatccccttttacaaatcacaagaaatataattgtagtcgctgaaattatgttcttttgcgtattcattcatacaataaagagaatcgaactttagaccttccgcctgctttggggatgtcatttcataccccgttacattaaaaccgttgtttagtttttcgttgcaatatttacacttcatttttaagatctccttttctagccgttgtaaatttcttctagtgtttcactaaatccgctcaagtcatcattccaccaaataagaaagcttttaatttgcttactgtcgtatagcgttgtttgttcgtcatctagcttcattcttgcgactgttgcaccatccttctttaactcgtattcgtttgaatatccttctacttgatcgaatatctttttagctttgtttagtatggtttgttgttcttttgtcattgttattcttcctttcttttataacatcgtgttatatagtgaaattaaaaaattttgaacatactagatttttatctcaaatcttaaataaaccccttttctaacatcgtgttatataaacgattaaaattttatttattcgtccagttttttatcatctcatttcttttcttgttcctttcgacatctttataatataacatcgtgttatatattgcaataaaaaaattgaaattttttcaacttttttattcaagttcttttaatcgcttatctattgcgcgttttgtatctttcaaatcgccaatataatctatcctatcatctgtactattgacagctttataaactgctggggcttttttggggtctggatttatccatttgtgaacttctcttaacgacctcttatagtcattgaattctttatttcttgctctccatcgtgcgttggcttctagttgtgcttggctcgcttttgccatatatttcacctctttagcatttaatagaagtatataacaacgtgttagtgagttcaaacatatataagcacttttatagctctttcagtctttcatcaataagcccgcgtaattcttccaattcttcccgtgtagcgtcctttttaataaagttgcgcgctcttgacttcttttgattgcggtaggcttcttttttatgtgtgcggttgtattcatttacgcggtttatttgtcgctggtgtgcttcttctttagaatatttctttacttttggcattttatcgccttctttttaacccttttgcttgttgcctcaatttttgggcttctttaagtcattatccagatttaactaatcgatagctaacatatagcccaactaacagaattactatattaaatagaattttcagcatttctaaaacctttctatttttctagttccatagtataattatatatgtaaaagggaaccgcgccacgattcccaatttataagttttatttatttgttagccttttttaagcgtttagcccgcttttttaaggctttttcttttagacgttgcccttgccaataatctttatagcctttacaggctaaccgataggcgccggctattcctaaaagggcgcttactactgtaagcatagccccgaaactcctttcatatctagaatttgaaagttgggactgcttaagctagtaattagcttacacttatataatatcattatttttaagttgtcaactaataaaattaaaaagaataaaaaacttttctactatataataaatagaaatcatgttctatttattaagaacgtgacgcgctagccgtgctataaagataacgaaagccggttaaaagtagccggatattttatccagtagaacattaaaaccggataagaaaataaataaggcgatttttgaggcaaaattatgattttatacttggaaaataagccttcaaaaaagcatgctttttactagatccgaaaagcatgctttttctgcactctctagttcttaaagcatgcttttttcacttacttaaagcatgctttttcacgtcttttactttgtaattaactcttttatcacttcttgtgccgtcttattttcttttcgtgcaacttttactaacttatcatacagttttgtttcctccccaacaaacattaaagagagtcgtctttcttgttttccacaaacgtgggtataatttgtaggatcataccaataacaactttttataatgttcatatcatgggttttgaagcatgtttttgtacattctcggttaattgcttcagcttttattcgattacaatgtccacacacaagctgataattatctaagttagcaatctcttctgatggtagctctccaaaatatttaacaggtaacttatggtcaatttgtaatgacttttcagggaacctttgcccacaatatacacagtaagatccactaacctcaattaatctacgctttaagtttgtgggaggtaccaaacgaccgtatttttccttaggacgtaaattagcaaccttgccaagcttatattgagcaaccgcacgcttagcctgtggtacattaacacgacctggcttctcaataggaatgccatgatcttttaaatccattactgctcttggacctactgctgggttaatccctttttcctcaaaatcaaacttagttatagtccccttctcgattaatagatccgctgctgcccttgctcttggatataaattatcataaatatcgtgaatatattcttcaacactggaatacttagttttcatatttaacactcctttttaaaaaagtagcgctaacgttagcttataattatcgtataccagtttgcgcgacacgttcttaagaattgatgatatttagaacttgctagcaataataaatattgtttaattttctttctaccttaaagattctacaataaaagctttttctgctcttttttacacttataggcttacttgcttctccaggtgctagtaaatgccaatcaacatcatctccaatagtatgcctcatcttcttgtacactcttatttgatgccattcggagtcccatccattttacagtaacatttatattactatcattaaccacccaaaacctatattctttttctttatttccttcctgataggagtcaaattctatacttaaacttaccttaggctgtttattaaaatgatcattggctatctttagtccccaaaatgccattgctgctgcaatccaatctggtattgttcccaaccactctatcactatatcatccccaaaaaactattaggcattgctatttatataaaaaagaagctcacactcctttcttaacgtagcctatcacagcaagttgtgacttacgactactaaaaggaggtgagcttcatgtctccattcacacttttttgataataattgaaatcaagcgtcaggcaatgtctaaaggaggcgtgagcccctgcgtgtcttgcgcctcttatctacttttttatatttaaatgccttatagttgcagctctttctaaatatttcctttatatcatattagtagctatttaatttctgttctaacgcttctgttaaagtctttgaaaagttaattcctgcttcttctgctttttgggctaaatctccaggaattgtcgtattcttttttaccattggcgttttaacatgtttctttgcttcagctaaatcagaaaaaatcatcgtaaccaatgatccttgattttctttctgtatttcttttatatctgaaacatttggcaatttttcttcgttatataacattaatccaagcgcttctgaaccatttgccatagcctctggcactcccatgccttggcttattgctccaggaacatcagggaatgtaacagtatacatcccctttggattctctgaatcatctaaaatagcagggtatgctacaatccttttttcactcttcatacaagaattcctctctaaaatgaaatttttcaatccttacacgattataatacgcctcaatacgtattaaagcaacaaaatttacctaaaacaaacaatttattactaaaaatagtataatttttgtggatatattgattttattttcgaaatcaattttaattataaaaaaggaatgctagctggcactaacatcccttcatcttgctggcatgaattaaactacttattctttaaacctgtttgttttagaattgcgtttagtgtgcctgggtaaattgtgtcaccttttgggaatatgggactacagtcacgattccttctgcatttgcaaatttatggtgatctccattaacactaacttccttaaatccgttatcacgcaatagtttaattactttttttgcctttacctcgacaataatcaatcacctcgattctattaagacaaaggagcaggctttattattatacgcctataatgcgcattaaatccacacaaaataaaaagagactgaaaaaccagtctctttttattttagaaataataaagcaatagatcattttaagaacttaacaatagacttataggttccagaaagaataatatcatttgtattgttataacaaataacaagatgtttaccattcctgctctcaaaatagtgatgagaacctagtctatatttttcgttaaattcttcttgggctaacattcgcaaaagctctttcactttcatttgctttattttcccctctcgtaattaacagccttattatacgccttaatacgcattaaagcaaaagattttttattctaattctctttatagaaattttgtacttttagataatgattagaattagtaaacataaagttcggcaacttttccgttagcataaaatatttgaacgttatatccagctgctcgtaattgattgacaacactcatattgttttcttgtgtcaatccatcctcgtatcgaatactaaaaccttgtccctcttgcttaggagcttttaagattttattgtttatgttgtttacaaggtgttcagataattttgccttcatcattttatccaatacaaccgttttaggtataatctggttttggctcatcgttaatcacctattagtactctcattctttacagtcatttttcctgcaccattcagcccattgtttacttcggatatcacgcttttttcctgcattacccaatatttcaacagccttttttgtatcactcaaactataaaaacttgctgattcatctattctaaactcatcaacattatctatcccatcaaaatagtgtaaaacttgatacaaactgacatatttgtatacccgccatagattgtcaatcttatattgagaatagtgaatattccataatgatttacatagttgaatacgaggaaaactattccaatcatcaatcatttttgcttttgccatcgatttagtcgaacacacaatatacgtatgcatttttagccactcatccatttagtttcatctccaattcttctaagcacttttttgcctttaggtcgtgattccagtcgattaaaacatcatagtgttctgcctttacataattaccctctaactttctttttgacttactcgtcatataaatatgtttttctttcaagtacctagcaaaattttcatactcactatctggaatacctaaatagtcattaaagttaggtacaaataaatacgtatcgccccgcctatacttgcgaagaattatagatgtaaaaataaatttgaattgttccatatcttcacctcaaaaccatttgtgctttttgtgggttgtttggattgcttctataatcaattcttattgagagttatctgcgctatccagcgtaatataaaaatgaccacttccaatatctgacttataatttttctcacctaatcttctagtcaaggcaattagatatttatcctttatctgcctttcttttgatcctatttcaattccaacaaatttggctccagtagcaattccatattctaaagtttcgtttactagatcaatgatttcatctggaatttcgacattttccaattttttctttcatttcatcatgagtgaggatatctttcatttgtgcatcaccgtttcctattttattgaatatcattcaagcctaacttcttacgtcctccgttaaaccaagggcttaccgtaaatgcgagaatatcattgattacataaatagaactattaatagccatcgctagtgttgcatccccctgcgcataagtaataccccaaagaattaattggaaaattccagaagctaaccaccagaaatattggttgttgtagcgcatgaaacacataattcctgctgttaaactaatcgcaaaactaatagcgtcaatccaagggcgtgggtcattagttaacttaccaatcaaatatccagaaattacatatacaagcaatgttccaacaattgcaattaaccattgcttaccgccaaatttacgaagatgatttttagtatcatcattccacgaacgtacggctaaaatgaccggcaagtccagtgttaatacataagctacttgttcaaagattgataggtagttctttgcagacaggcctgcataaataaaacaagcagcgctaagaatcccaagaatcccgtttagagctttagcggcattgatggctagtacgcatagcacgccaagtgttgtccctataaaagtaatcagcgtaacacttgtaatctttgattggattaataaagccaattgaaaaccaaaactaaaccagaataacaaataattttgaagaggccacccctttaattgaccaagtaaccacttaaaatagttttgcttatttgttgtttgttccatttatttcattctccttttttattgttggactggtgtttagctcttatgatattcacgttagcgggcctctgatatcacaatatatttacggaagttcactggatttggttcaatgaacaacggttccctagtatctttaacgactattaacgccttagcacatgcacataaaagccacttcattgcttctttataatctcctagagtcattttgcttataacgttagaagttatcttatctattcgattaaaagtaacagatttcttaaagaacggaatatcgcgagtaacaacttcccattcggtagctaaatacaaatgattatcgtgtggctttaatgatattgaaaagacaccatcactaattaatttttcaccagcatttgatattttagaaggttccatagttaatgctccacgtacacctataccactaatttttaagtattttgtatcagcgtatttatatacttggtaatcattaaaaatacctaaaagatttacacaagcacgatagttatggcattcccagaaattcattgcaaattctgtagctagcgccttattcttatccgctttattgcaccgctctttaatagttaaataacttctccgtattatcgggacaacttcttttattgtgttctttaatatactcacctgttcatcactgattgggagtttatcagtgtcagctatgattaagtcagcgtaattattaagtgaagtaacagttcttttgataatttcaccgtcatcaagatcacttttacctaaagcgattgaccttaatatattaaccaaactatcaattttttgatcttcaaattgaattttttctttcatgttctctaatttctttctttattagcctctagcagctccaataacgcatcatattttccttgttcaaattgaattctaaatgtttttgtttcaatagtatcaatatcgatatagtgcatttcctctcgtaatgaagttaggatggtaaatgaatagcctgttccctcaccttggtggtacatatgaaaactatagttagacaattccaacaaagtaaccgcttgccccgcattatacggatcagatgtgtaccattggatcggcaaataatcgtctgacctgttgtttatggcttctttcaatgattcacgacaatctaatagctttcctccaaacgaaaaatgtctaatttgttttgcattaggtaataaaaactctttattattcccactagtgttacctcctagacatcaaaaaagcgggtagcagtttttacaccgctatccgcttctatgtatggttgcccattggtttgggtagttcaccttcattggattctgttctgccacaggttcatacgggctcactaccggcagacaactccgatagctccgtatggtttacaagacctgaacacggatctattaccgtttaactttcactcgacatgagctaatattatatttttccttatagctgtaagaaaatgctcttgggctactcgtaccaacctcgttagttatattctggttgccagacttcacaagctacgatcttcttggcttcccactttggttctcatggtaaccagccatgatttactgtgggtttaatattacgatcgcctaacgggttgtgcaatgaatttcaatgttggtttctagaacaaacaaccaatcgactttctttcatcgacttcactaggtattaattagctcttttgcaaaatatatcctatcgaacatattcggcttattggtcttacgttcattctgtacaggcgaaatgtcactttcttatgcactgccttcaaccatgattaattatatcaactctgtattttattgcacgtttagacacgtcatttttcaaaaatttttgcaagttctctaaagttttgagaacaattgttaaccattgcctcgattcctttttgaaaaaccggatcggaaaacacttctacaagtaagttgtgcgtttgttgacggttcattctctctttgtacgccttagttagttcacgcttagccttacgctttttcttattcatcctgcatcccctcagctaatttaattattacgacgagaaagattcttaattaccttttgcaatgaattaatctgtttttgcaattgaataatttccgagcgatttataacttgatatgaaggcgtaatgattgaatccaatcgatagttgatcaatgttccccttttgtgggctttagttaatctccgcttcatgtaacgctttcgtttattcatagaacaactctctcctattttgaattgtagataacattgtctcagttacttgaaattcaatatcgccaagtactaaatggttacttaatacttctgtgctaaaacaagtaacatttagcctaaccttatgaccagttttatcgattaaatatattccaggacgtgttccgtagtgcgatcccttctgctttggataacggggatgtttccttttatttttcatttacttcgtcccacaatttatccaaaatgctcgtatcaatttgaaagtcaactccacgataacttgttaatggttctttataccatccttttgattcagccactttatcacggcttggcacttgtgtctttacgctgtcaatcatttgtaaagcctgcatcgctacttcgaattcaactgatgacgtcggggattgaatagtggagataacctcttcaacagtcatttgttttgccaacgcttctttttgtgattttaccatttcacttaatttatttaattcgctgtaactagccattaaaatccctcctgattatctgttttttcaaatttctccttgaattctttcgacgaataaactttagagtttccatactcatctgtaacaatccaatcaccacttgttacccaacatttttctgtacgattgttaacagaatttcttttaaatacattgtctatgtaataatttttagttatttcatatactggcacgtcttgcattacttcatgttttctcccaaacagtccctttttggcttcagaaaacacctgtacaggtcttatagcctcatgaaccattggatatttaataagaccgtatttatttacaaagtcttgatcaaattgaacggcattatattttcgaactttctcttttacgatatccattaattgacctcgactttcttaaagcgttcaaggaattttttgttagtaaccacttgacactctccctttgagttagttaatatccaatctccatcagttactaaacggtcgtcgcatgtatagtaagcatatctttcaggaaagatattagtcgtttcaataatttcttcgttttcggctaccatcggatataaggctagtgactttttagctatttcttcacgaaactgaattgctccaaaatatcttacgttttcttctttatcttgaacaatcatattctcacctattccatcccatcgttataaccgtgaacatagcctttatagtaagattttgatacctttccttgtggctttgaatgcttgtgtgactttgttctcttatcaacagagccattcttgtatccatcgttgtagcctttagtatattgatctccgcgatgtccaccaggatgcgttacaccatacatccaagttgaaaacgtatggtgagtagcgtttggagtttctgaatgattatcgttagttatggttgttgtgtgttcaccttcagtagttgtatgtgttgctgtcggatgagtagcttctgcatgtgtagctggatgtgctgccggatgcgcagtagcatgagcaactccatgtgccgcaatcgcatttactggttcagcttggttatatcccacataaaatcctactaacaccgttccaagaattaataatgttttcttcatcaataatcacctttaatctagttgcttaattgcttcgtcaaccatttcagcaattaacattgttttttcttcactcaattcttcatttacaataatcggcatgtctattgcttcatcttcccagcaaagtttaatttcaggattgataagaagtaaaactttgactccatagccgagtttgtataatgaaaccactacttctacaagcgcccgataattaacatccccattattattcatataaaagtaagtattctttttacccattcgagcagcttcttcaacagccttatcagtatttttaatagcttgatttaccatctttttcgtattagataacgctcttgcttcatctgctgtcgtcataaggtctaacgcactattcattgtcatcatctcaagctttcatttgtaaaatcttcaacatttcccacactttgtcctttaactacgcttgccttaaatttcagcttatctcctggacgaattaagttagcctttacgtaatcattagtgttaactgtataaacaatgttgcttccttgcagtgtaaacataactttatttttatctgatactacaaccgaacgatcgacagtaccctggatattcttttgcttggtgcctggcgtatttctagctgtcgcaccattattaactaaggcttgacgaaatgcgtctaatgcactggtaggattatttccactgccataaatagactgatcttgtgcatcaaggtaataatatccacgaattgcatgcgaactatctagaatagtcattacccatgttggtcgtccgttaacgttataaagaactggcatctttgccttccattgttgtgctttatagttctggttagcattttcctttgcaccagtactatccatgattccatttgcagaatagaaggttaatttacccgttcgagcattaatcattgaataccccattgccgagtccgctttgctatttgggttagtaaaatcagtaaagtaactaattgaaccatcacgattaaagattgaggttactccatcttccggtccgttattagttggtttaataacatctgtacgactaaagttccagaaaccatgcttatatttaccaaagactttgttcatttgggctgccgagtcacttgtgatcccttcatcaataaacttaggcaagttctttattgaataagtcttttgtgaaccagtctgtgcattcatcactactacatgtaattgttgataattaactcggtggctaaacgtttctgacttgtagaccgtttgtacccaataaggcgtgccatcatcatcaatttcaagctgcggtttgctcatcgtaagccactcagggttattgcgataaatttggcgatctacatcatggttaaagtaagcgcttgttgcatacttataaggttttttaatgaattttggttcagcattttgattagttgcatctactatgaaatatccagggatttcttttgctctgcgcattgcgaagaatccgttatatttcaatggaataatataaacaggtttgcccttataatattgagcttgaactgtatctggagtatcgaagtactgactgtttggaatatccgacatagacttccgtacacgattaagcactgtattaggtgctaaagcgacaggggtttcattacgcttgaatgttggtgcttcactagacttactatattgtttcgagattgattgccatgttggtttaactgacagcttagaatgaacctcaccgatgcacccaataataaagacacctgcacagacggatatgcaccctaataaaagcttcgaccctttcttatcaccgtttgagaattcatcccaagctgatagagcaattaattcataaataattccccagaaaccattactaattaagatactcaaaagattacgcgacggtaaattaatatatacccgtaaaaaggtcacacctgcaaatagcagtaataacaatccgtttaatataagccaactgttatttcttcgaccataaatgatatttactaaaaacaaaatcattggtgcaatcatgtacaccagcatcattgttcccattacttatcctcctctggttctttcaacaaatcgataaatgttgaagcggttactttacttggactcaaattaataatttcaggcgtcgttacactaaccttggtatatagctgtttgttcgcaccagtaaatgtaccttcaacctttgcggacttagtaatatcttcttttaacatttccaaatcattttggcttgaaatgatctttccgcctaagagcttaatcagatcattcaccgtaaattgttgttctacttggttctttaagatttcaagtagtagttttgtggaattatcaactccaggtacttgttgatttccataactatcaccagtgaatgcaaccttaaagccgcttttagtcggaattactagcattagtgtctttgatttatcgtcatttgatactttgctatggaatagaacggatttgtcaccaatctgggttgctactccttgttttgcatgcgtatcaacatttgcaccggtcacaaatacatcaaatttaacttcggacgaactgtaataatcattaacagttacaacaagtggatctttaattgtgtttgcagaaactttatagaattctgctgcatgaccatattgatttaagtgcgtcatatcaccagagtaagttacttctccctgataactaccattccatccataatgatgaccacccaatgacatcatatgtaaatcaagatcagcttgaggttcgtcccatgcaattcctagcgatacatttttaccttcaaaatcataggtagtcatgtatggcaactcgccgataaagtccttcgcagttgttggtacggcatactcaacaccttctggaatataaaatactttattacgccaattgccatatcgatgttttaatacatctagaaccatgttgtgtaatttttcgctacgcaaggttcgccttagctcatttacactatctttgttattcataacttttaaataggtttttccgttacgaattttgaagtaacgagctttttgtgttccatacatacgcagtaatgcattatctaatttaatgagcttataaatgggagccttaaacattgcacgttcaatatcactaaactccacatcataatccattacgtgttctaacggtgattgcttacggggttcatacattcgctttgataagtgaatagctcgattgattaaggtcttatcctcaaaatgtttccgtaacactaaatagagtttgcgataacgagtaatatgtttagcggcttcttctattccaaaactcttaacatatcgttcaaatgttttttccaataccatataattctggtcactactccaagaattacttagatgtcctagacgattgatcatgtcacgagatttaattagcaacgtactatcagttgcaaggtaaattagataacgagtaaattcatcgaaattctttggtaagagcattaattcttcacacacatgacacatatattcacgattcttgatttggtctacataatcaattgttaaatgatagccatcgataatttcagaaattaagacttgatcttcgttacttaatgcaattccgctagttagcatattcttaactttctttgctaattctgcttccgtaattgcatcaatataaacaagttcatcattaatatcgatgtgcaaaccatttagaaattctggctcatagatttcaatatcatcacgatcaattccacgtccatacgtactcatataatgggctaattgttcaaaccgcaattgcaattcactacgaccttcgacatcagaaaatcgtttatagaaggttgaatttactttctctgcatcaactccgtattcccatactgctgatttcacaacagtcttttgttgttcttgagtacgaccatctaatacatgtggattaataaagacacctttctttaacgcatccaataataaactgggttctgttgcttgcagattgctaaacttatcttctacaactgctttgaataatttaatagttgcttcttcttttctcatgttcggtctcctttcagaaaataaaaaaggcgaccttaaataaagtcaccttagtttatatatgacaacgcgaaacgtaaacatgtcttatatttgctgtataaattaataggaacgtttttctgcgttgtgtttatagatacggacggtaattcacaaaagatttgaagtcttgtttcaaataggaaccgtcttctgtatcaattattgaatacgaacagtaaataagtatttagtttaacagactaagctataggaactgttttctgtattcagaatacatattctcggaatcgaactgaggttttcacacgggggatggtgacgacttgccaattagtctaaatatgtacctaaattagggatgtacaaagctcatttgggattaactcccaattgcggtgtaaggaatcgaaccttaacaaaactgcttatgagacagtctagcttccaaagctctcaccgccataaaaactagcgaatttgctagttacattacatcaacgtttagcttctttcctaattcaactagaaaactattacgcaattcgtacgctttcgtagtgctaactgggataatttgtcgatcacataaatcaaccatccgtaacccgacattgcctttgaagtaagtttcttgaataatcttttcagtaaccacaccggattcatctaagcattcatcaattgcttgacgttccttctttaattgttgaagccaccgatcatcattaatagttattacttctcgaccaactggatcactcagtttattcagagctcgaccaccgccaacattatcgtcttgttcaggcgtaggatatttcaattcatcttctcgttgcttaatgtaactgggaagtttgggataatcacgcagtatgtcttctagcatatgttgtactgatttacgcacaacttcacctcgaagatctcttatatagtagtcaatttcatgaccaattttggtgtccggacttgaaccagaattgacgctcaccacttgagcaacaccaaaccaaagtttttatattgggagtgccactaaatagcagcaatgttaagagctggaatcgaaccagcttcatgcatatgtgttgtggttgcaagacacataagctctcaccagagaacgttaacaatagtagctgacccgtaaatgtaaactactataactgatgctggagattcatcagtaattacggggactggactcgaaccagtgaatcacggtaccaaaaaccgttgccttaccaacttggctactccgtaataacatcgtaagctaagcgaggcctctttgatctcctatacttaactcttgatgtgcctatcgtcataggctcctctattagagattattagctaacataccagcatctgtggtagtgatgatttttcccaagaggactatgctgattgatggaattgaaccaccgcaacctaccgcttcaaggtagtgctctaccttctgagctaaatcaacaaaataactacccagaaaacgcacgacagtagttagacaagttacttaatcttcattgtatgctaagttacaatttccttaagcagagcttgtgtcttcattttataacccgaggcttagctccctctttttaaggctttcgcggtgaattttttgctaggcttatatttagatagagtcctttaggcttccccttatctctacgtttattcaagtggcctccttgaccaggacatgtactttatcctcttcggcggtttagtgcttccgtcaagcctagactaacattctcggacaggattcgaacctatcatacgcagttgctaacggagcaagcggtgactaatactccgaccttccataggcaacgagaatacagagttgaattttatttcggcattacgcctataactacggctggagtcgaaccagcgaaccgacttgcaaaacggaaaagacaattcaaacaaacgatttcagtcggatatccaacatcgtagttaccaataatcgaattgaatacaattattaagatactctttttaaaaattaaggcaattttagacacgcgatttgcaaaattttttctaaaaagatcattagtcccctaaaacacataatatgtattccaataactaatactagaaacaatgcaattaccaccatcataattagccaagatgtaaatgccatcactgtacttttcattgatgtcgcctctgttttaggagttccactttctttgaggacaagctccctaggtctactaatttttcttcaatagtatccaaaacaatatttctatcttgaatcgactcaatgaaatcatactttgttccatcaatgactaacaatggacttgcatcatattatttttcccacttctcatagtgttcgattaaatcatgatagtactgtactaaactaggatcataatctatttgttcaaacgccctaccacgttttttaatcctagaaaccatcgtgtcatagtcaacctttattagcaccatcaaatctggtgcttttttataaggagaaaagttaggatattcttccatcatggtgttcagtaaatccttatatactttccactcttcctctgttgcgtgtccctgctcaacattcatcctcataaaaatttcgtcttcatagattgagcgatccaggatattattatcctcttgtacggcttgtttaagcatatcgaagcgtttacttacataataaatttgtaattcaaaggcatacggatttgtttcccatttgccttcttcaaccattttatttccgtgataaaacataggtaaaatcgggttgttttgtactggttcatagaacgcctttgtccctaattcttgcgatagaatttcggttattgaactcttaccactacctatcacaccactaattgtaataattataatcaacccctactttcattattgtctaaacgtacatatttattcacgccatgttcatcaagagttaaatgccatttctgacgtttaatctcttttctaatttgccacgctcgtaataatgcatcgtcttttaaatcggctaattctagcacctgttcgaaagcaattcgccgttgctcatagttatcgttgtagtgattgcaatcattaataaatgcgttctcggcgatacagacatcacgatacatattcagaattttctcaatggcaacgctgttaatttttggctgtttctcatccataatttattctcgctttcttggggtttaagttttcaacactccactcccaattgtggcgagtaattaatctaacagctttaataggaacatttttactccgagcccattcacacatagcaatttctatttcatgtgtcatcccattttctttttgatcataatacatttctaaaaaatgcattgccgattcaatccaaggaagatttcttccagcgataaaatcgttaagtgtattaagtgcatcgcttcgttctaatgaaacgcgataaattatctttagggtttgactattaggaatttcaatcattcctagaatttctttatccttagcagtgagccggttttcttcacgtcttactgctagttcatacatttggcgagcaacttttaattccaacttgacaccccacattcgttacccgttgtttgtaaccttatatttctaaatcaccaaaagaaacattagtaattgttcgttcgtctaatgtcaatccaattgccgaagctttttgcaaatcaacagtttgattgagtttattgatgccaacaatatagtaattgtgtttgtgataaatcactggtgtttcattctgacaatatttaattacttcctgttcttgcattacatcaattcactttcttaatcactgaaccaaaaagagagcgcaaataaagcaatagtaccagcaactacttccgaacttgctttaaatgctatttcagcaattaaaacagcagttatgcataattggggaatgtaatcacttatatatttcatttgtttgcttcctcatcatagattctgagttgcgccatcattgaaccaactagtgcagcaaacccatctcgggtatattcaagattaacttgggttttcttttcttcaaccccatcatcagttaaatattgcttaaacttttttgcagtaatgataaatttaccagttttaggactacagctaattgatccaccttcacctttcttcacattaaataatgcttcgttttcaattttcattaatctatccccttattttgatcttcttctacaatttcgtttaatcgttcgaatttatcatctacatcgtttaaggcaacatttagagctctcacagcttgaaatgctttttctgttttcgccttatacaattctgcacttacagacaagtcacaaatcatactatacatatcggctaactgcgtatctgcaaaagttctaacattgttttcatgttgcttaatttgcgccattgcttgttgtaatccaagcgcccataatcttgcacgatcgctaatccggcgaccattaggaatgccttcccaccaatcgggatcaaaatcaattagcttatcgcgtaaatcagaagcaaggtcatactcgccagtaaattcatcaaaacattcaattaaatcttgtttcatttcttgacgatcttctaggctcagtgaatattcttcttcatcgtccaatcctaaataatcgcttaattctttttctaaagtatctgagtcatattcgtacttatcatcagacgtttccatcttgccgacaaagtaacctaagctcttgctgtaatcgacaatattatcaagagtatttcccgttgtattccaactaagcacagcactgcctaaatctcctgaaatacttagagtagaagtcattcgattaaaaaagtaatcaatacgatctttaaattcataacctctactcttccagattagaaattcataaggcccatagtgatgataaaaggcaatatgatttttaaaaatatccttgttcattacttccatcccttaatctctttgattgcttcatacaatggtttatccaacccatctaagctacagtaggcatttattacttcttgcttatgtgggtacactacaatgtcattttcttcgtctccgcttgtccaagttgctaatattgcgattggataaccgattaatccaacacccttgccaaaagtaacgaagaagtcatagagtacttgttcgtcattatttagtttcatctttgttacctcgatatataaagaaaatcaatattatagcaagcgctattagcggaattaatcctaagcaccattgaaaaaatactggtgaagaaaaccaaacaattgcataccacgatccccaaaccattccgcctagcataacaaatgttgtaactgcaaatgcattaactaatttatccataaatttcattactcttcctccttgtttagtggtcgcttgcaaaatgggcaattcggaacttttaatacattgattatccctaatgttgtttccatgataggtcctttaccaagtacattgcttataccctcatacactggtccattaccgctacccaaatccaaatcgttttcaataccagttgaaataaatggcttatatggaacgtgacagtacggacaattcttttgcttttcagttagtttcattagcttttcctttctactcccatatattcagggccaaacatggcataagtcatttgtctagcgcttttattggtttctcgacagctttttctccaacgtggtttatgcctgtagccaaatttatgtgctaaattccttgctacatgatacgtatgttgtcgtgacgctacctcatgatgtacttttcgttgtttactcattttctctcctccatgtttccacacgtgactttactacataatcaggcgtatctattttctcgtgtttcacaattttttcgtggtaagggcaaaaatcaattaagccgtgatttttagcacactcatcacacaaagcacaatcacaagttatttgccgttgtgctgacaaaaaatcttgaaagctcgttcttccgcaaataaatgttggtgactcgggatattgaatcacgtaatcgcaccatttagtagcaaagcgtttatggcacacaccgcatttttgctttgaaaaatcttctttaattatttctgccatttttaataaagacgctccatttcgtcttgctcttcatatcgcctaatattggttgctggccaaacgcttcgaatatttttttaatcggtatctgatcttcgttccatttgaatagcattattccagttggtttaagcactcgcattatttcttgaaaggcacaatgaaaatcatgtggccaagtcattaaatcaatggttccgtacttcttagcaagccatgatgtcttacccgcacggaccaaatgtggcggatcaaatacaactaaatcgaaagtttcatcagcgaatggaatgctcttccaatcagcctgcacatctggataaatttcaatctttcgctcattaccacgatccattgctgtgtagacagctctgcggatatccatgtaggttgtatgtggttcctctttgtcgtaccagaacatgcgactgccacagcacacatcaagaattttcatagaataaaccagctttccatatcgtagataaagctttccatctttcgtttgttaaattgatatagcaaagttgtttcatcgctgggacttcgaaacacaagagcttctttactaacttctaaatatccgttgttatcagtatttttatcataaaattcccaataatctgccccaaaagaattagcttctttgggagtaaacgtcttccagactttttctgcttgttcctttaagaatttaagtaaatcaatgttatctaaatagaaccgataatctagaagatcttttctttctgtgtggatttgaatattagacctattcacccgcacaattaattttctaccgtgttcgtcttcaaaaactctctcttccatcattctttccttcctccgttgctatcatcaactgcattaattgaactgccggatctactccctgttccttacataacacggtaatcgcttgatatagaactcccataatctctttaggttcaaaacccagagcataaaagccagctaagcatttatctttattaacttttaggacaatggtttcaccaaattcattcatttcttcaaactcctcataaatcaattaagttggcaactacgaaagcaataatcatcaatccaataatcagactaaatattgtttcaaggctaaccttgcagataatcattgtgataataattgccgttacacaaacaatccccacacataacggtaattgcttcattacttccacctcttaggctttctagctttcttgtgccaccattgtgaccactcataactcgtgtgatcgtgccaagccatcatatgcttagccttagcaatctgacgcttacgagtgcgcttgatcggcttatatccatgaagcatatatttgaaatttttaaaaaattgcttcatttctggcgatttaaaaaagttatccacattttcttgcgtaatatctatatcttcaatacgtttattcattcttgtcctccacaggttctttcattgcatcaattgcatctttaggaaagaaatctgaaagactatctagtttcttttgcgtaaattccatagcatcagctttttcattagcaaatccaaaatggaactcaacattattagcgcttatattcattgcatcaacatattgcttaacaggcactggtccctcagcacatcgcattgcagataaaacatatttcttttcaggaaaacgttctttaataggtgtatcgacatattcctttgtgatttccaaaagattgaaaagcccgtatatatcaatcactggtacagtatttaaatttaatttaacagtgttaaacatgcttgaacatcgatcaaaggtaagcagtgggtatttacctaaataaattgtgagcaaaccatcaatactttcagctacactgaaaccatacctagataatttctttttgaattcattaattttcaatattctctctccatcaattcttttactgtcgtgttgcataagttagcaattacctcgagccttttcttgcttggcattgagactcctctttcccagttactaactgtccctgttgaacacgtagtcgtacctaaaattttatttatcttatcggcaacctcatcttgcgttagattcatgttcattcttaactttagaatctctttgccaatatgttctttttgacgagcatgccgtagtttcaaactatcaaaggacatctcttttcgcttatctatcaacccttcatacttacttctaagtttaggattagcttcgattgttcttcgaagctttggcgtagagcaattaagtttttctgctatttgttttagagtaagttctgtatttagcagttcgattaaatctcggtgatttattttcgctctccgtctatcttttactaactctcgaaattctaaaatcgcttggtagtcttcgtgatcgctttgaactaaatcatctaaattgaaatcatagtcatttaatcgtttaccgtacttatcttctaaattccgtaagtgagttagaaagtcatttttagtaaggtaatcagtcatagttactcctgactacttgttcaagttgttctggatcaacataccgacttacaaattcaccgaacttttcccgttcgtcctcactaatcattactcggctgtgatcataatcaacactaactactgagcacaaagtatcttgataaagaactaaagtgttattctttagcgcctgttccgcctctttcatcttcattttgttctaacctttctacttcaatttcaatacgtggtcgatcactgtagtacttttcagcaactatctttacaatctggttgtcatcttcccatagcagaccgtttaagccatccaaagtagatttgatgtaattatccgtgtccggttttacaatcggtctgtgtattcctgagaggcgcaattcacgctcttttttcgatacgcttgattgaacttgtcgataaaatttaagactaacaattaacgggccagttagtggcttatccttgtactggaatttgcacatcatccccaactgtttcttgtaggtcgatacctttttcggatcatacaagcgtattcctttccacgttttagttgctctaggccgtgcctgttcgacgggctcaatattgaatattattttcattttcacctcgttctttagttcaataagtctttaataatcgaagcaattggtgcacaagcgtgaataatattcaaacataatgccattaataagcagacacttattgttcctccaaacattgccgtcatcccagaaacaaaatcatagctatcatgataatcacgatgcttcctaaaaaagaaaattgatagccatatagtgccagttaacgcagcaataaaaagcacaccgcataaaactgatagaacgattgctgacatttgatattgttgaaccattgtcttagcaacggccggcaactcgctcaattgtccattaagtgttttcagtaattcttgttccgcttcatgtttcatctagtcgcacctctcataagttcgttcaaatatatcttgatcaatagcccagtgctcttcatctatgccagtagcgatgtaatcgccaatgtgcaataacatctctccctctttagtaggtagataataagactctacttggtggtggtgacctttacttctatctaatcctatatgataatcacttatctgcttattagtagccttaaactgttcagcctcgattaaggctgtctttctgtatttatgtagcattagtaaatcaccgtttcctctctataattattaggatcaattggatcgctaacttcaaaatcagtaggcctgtagaaaatagcagtctgaaatacattaagcatatctgcaactaattttttagcgctttcctcgttcttagctatcacaatatgtctgacaaaatataatcccttagagcgcgtgacttcgtaaatgtacattattctttctctctcctttttatagcaattagttttgccatatcgttccattccacattaattcgctgtatcttcccaagataaggacgagtaacaattatcctgtcactagaaagaccttgattaattatttctcgggttgattctcttactattaactcaaaaccattgcgaaatataatctgcgttcctgttaaatactctctttccactagctgctcactttctttcgatttgcaatccgagcctttaatttagcaatatcctcgggggatgctttcttgtttaactctttttgatcttttttactccactcaggcattttctctcgaataggtggacgttttccgtgatttaatctaaattgattaggcgtaatgccatctgttacaaggacatcatcaaatcgcccattaaaccacgttgatccattcataggatgataccaactattgttttgttcacagtaaactaaatacttcttcaattgctttgccaggtaatcatccgtattcttagtggattcctttcgccatgctttgtaatggttaaacgcttcttttttaccctttttatttggatagtctttccaaagtttctcaaagctagttttaaggacagatacggacagtgcattgcctggcgatgcactatgtttattaatatcagtattagtattattagtattagtactatcagtatttagtagtgtcggatttaccgtatccggtgaatccgtatccggtttagccgtatacggaaaacccgtaagcggttggtccgttacgactaagtcttgattaccgaattttccattactatttcgcttctgttttctagtcacatagccatatttttttagttcgtccatgaagctatatgttttatctctgccatctttgttactatgggtgattaattcactcatatgaaatttccaatcgtcaggttttgatagcatatattccagaagacctctagctccccaactaagccttttatcctcaataattcggttgtctataattgaaaatcggtcttttcgcttttgcctaataattgccatttctaatcaccatattttcctttgacccccagtttctttaagatttctggtggcagcttaagtcctttaacatgtatgtggtattttgtttcaaaccttttattattaagtctttcgatttcttgatgatgaaatcgacacaacggataaagttcccgtttagaatgatcaattttgttgcgattattccccataccaactactgacccttcgacatggtgaaagtcggcctttttgccacaaataacgcatttgtctttcagcaagcacttgtaaatgaagtagctttcattacgtggcaacagcttataaccatttctaacaggaacatcaaactcaaagataaaattgataacatccttaataagcttatttgcgtcacttacagtattttctgtattatcagcaagactaatctctttaccagatgtcatttttgaatatcttttatagaaatattcctttaatttttctttaggcatccctgaccactcatgaatatcattaagcaatgcgaagaatagagtgcgttgcttagggtgaaccttgcgaggatccgtaaattcaaattgaataggaactccattgatcaagccatcattcaaaattgcgatatgttccaaattaatatttttatctggaacaattacccacatgttattgcgatagtaagcttttccactttccatttagaatggcaattcgtcatcagccagatcaatactttgtccaccattgccaaagtcattattctgattaccgtaatttgactgagcattctggttttgctgaggactatttgatgttgcgttgtgtgcattattatttggtacctgtgaggaatagttattattagattgttgactattttcttgacgtggctctaatagagagaaactatcgacattaatctcagtcacgtaaactcgctgtccttgcttattctcataagtccgagtctgaattcgaccatcgataccaacaagtgagcctttgtgagtaaaattagcaaaattttctgcagcctttcgccaaataacaagattgatgaaatcagcttcacgttctccttgttggttcttaaattgacgatcaacggcaatcgtagcttgtacaacagccgttccacttgtggtataccgtaattccggatcacgggttagacgtcccgttaaaattgttcgatttaacatttacttctgtttctcctttgatttatgaatatcttctacaaaccatgtatttagattgtcagcattgatttttagcaaattacattcattttgtaatttgcttaaggcatatacttccttaccaaacgtttcgccaccattggcttgtgttatcatggcagcaatcgtgtcaacacgtgtcatcatctgcattaataatgttagtgtaagattttcataggttggatgaataattcatctggtcgtggaaatcttttttgtagaccaatttacttatttacaaaaaaagaaaagaccagtagcctttagtgtgtcgaatactaagcaaaggcaggtctttcctcatggatattttaacagaaatcgagcagaatttggtgaaatcaggcagtttatttgaagctgaacagattattttaaaaggggtattggagttaggacaagtaatcatgcaaaactttttggaaagcttagatcgaagcttaaagtcccaagctccagcgaactatcaagtaattaataaacagccacggacgcttaattttatctttggcccggtgacttttcaacgacggtattatcaggctgggacaaagaaacgtgaattttacttagaccaacaattaaaaattaaaccacgtcgtcgtttatcgccacaatacttaatgatgatggctaagattgcccaaacaactacaatgcgcaatactgccgacattttgaaccttgtatttgacagcggaattactgccgattcggtaatgcacgccgtgcatgagttaggaaatcaggtagctaaacaaactcaagcaaaagaacaccaagctactcctcgccatatgcctaaaaatttaactattgagggtgatgcctttatgattaaaggtaaaaaagaagcaggtcagctgactcttgtgcaccattatcgggtttatgagcgagtagctaatcaaatcattaatcggcatgactttctcagtgttgggcaccaaggacggcttgaagcacgactaagtgattatttagaccgccattataagcttgccggtcaaacgatctttttggccagtgacgctggcccaggttacgaaccagctaagctattaagtctagttcctcaaggtgcacatggtgaatactttctcgaccgctatcattgtttacagaaaattgaacatactttaggccggcacaacgagttagccatgcgagcaattaaagccgttcgtcatcatgatcaagcagagctaacaataattttagatacttatgaatcacaaaacctaacggaaaaacaagcagacgacctaatgcgtttaagaaagtatctacagcgaaattggcggtatatcctctcaccacaaatgcgtggatttaaggatattcatttaattggttcagtcgaaagttctcaccgggcttttacttaccggatgaagaaacagggcaagtcatggactaagcagggggctaaagccatgattggtttaattgaagcccgaatgaatggtgaactgcaagctagtttaaatacaatcctagaacaattaacagttcttcctcgagtggctcaaaccagcctattacaggaaatgcatattcgaactggagagtttctaagaaaggcaccgacaaagccgtcaattggagcagtacaaggaataattccgattaacacggccacaagtagaccaatgggacaactttttaaggcactaacccactaaaactgtatatttaaaggctacctatgaaaacttgacagatacattaataattgttgtttcgtatttttaagtgtcatgtgttatactcaccttgtgtattgttttttgatatgagcttttaactatttgcggtagttttaagctctttttctttttgcttatcgactttttcaaactcagcagaaagaaactcaaatatttcttttgcgattggtacttggtcttcactcatttcatcaatacggtgcagatcaagtatctttttcattggtacataaaacatttgttgaacagaattgtaagacgtttttcgacgccattttgaactcatatgatcgtgacaatagctgtcgatacgttttcttagttgcaaccagccagtagtaatcttcggcgtattccttttgttcagcgcttcatatacttgatacttaactttgtgttcaataattctgtttaactcttcttctgaaatttccatttatatcacctcccctcattgcaataagttaggaaataattcgcctagcaagataagaatcagtaagacagccaaaggaaggactccaaatagtgtccaaccgccaagccagcaaatgaacatcaagaaacatattcctgtgcatgcaaaagctctcaccatttacacctcaaatccataatcgtcaccatcaccactgaactctaagaccgatagacttcttaagagacaatcctttgagcaaaaaatattatctttaccatcaggatcatcaaaataattacgttgcagatagttgtctcctacaatgtaataggtatcgtctgggtcaatatcttttccgcactctgcgcattgttttaattctggttcttcaaacatttttaaaactcctttttctaatattgtgtcgcccacgataacgtggttttagtattttgagactattaccaaccaaagtatcaattattgccattaagatgagacacattgctatcacacaaattgaaacaataaattctgtcatcctatgctcctcttcgtaaacgtccagatttttgttgatgatactttgctgccttgtcttctaaaaaggctacccattcattttcatgaatccagtaagtccgaccagtaattctaataatcgccgtactaaattcatcattgagttcacactcagccacaagatcgctaaattgacttttttctagcccgtactttttcattatttcgtctttggttttcacgtcatcacatttcattactgatcctcctcatcaagattcgtaaaccgaatatgagcaccttgtgactttaagaagtcgattagtaaatcacttcccgtttggcgttgatgaaatttacctaaaatgttcataattcttactgctgtaagttgtacgttgatattcaagtattccaataagaacttaatcccatcaggaatcttgttattccagcctacgttatcccctatccaatctgtaacagtgtaataatctttgcttccccaagtatgtcctttgtattctttggtgattggaaatacttgagcaaattggagaggtgttagtcgcttaagtgtttcgtctagcattaagacccatgccttttgcgtttcccagttacattcttcaatcacaggtgtccaataatgaatcaaaataaaagctagttgctgtggggttcttttctcgctcatattcaatcagtcctcaggtttagttaatggcaatttatgaaccttttcccacttattaagggtgactaattgcgattcagtaatccgcttagcattttgtggaagactgtagtaattaagctgattagcataaccaagtgcttcttcaaagtcactatgaaggattgctgtatatttaattgctccaaaatggtgcttagttaatgaatagaatgcacgaacaatatgcccatatttcttagaaaagaattctttaccaccatattctgggttattgaatttatgctttaaccatgatttagtggtcactgcggctcgacttgtaattgcttgtttaagccgatttgcttctccatcagttaaaggaataaacttcttaatctcctcaatactctgattggtatattcttttaattcttgctttgcttgttccgtagattcagcaattgattcatataccattttgttaatctcggcttggagtgcttgtgcttttactaaatttccaagcacagacaagctagatttctctttactttttaccggtgctgttaatgtttctttcattactgataatctccttctataactcgtcgaccgcctaacattgaactaagtcgatcaatcgaatgttgtaataattcaagacgcttttgcagattcttttgtgcttgttcacccatctcatcaatatcttcttgactaagtttctgcaattcaggaatccaatcattaatttttaacgaagtgctatagccgttaatttcagcttggcgcttttttcgtttcaattcttgttcctgtaacttgtcagaactattggtattttttttaatacgttcagcggctttaagttctcgtttgtaatactcaatattttctttgtctttagcagactgttctttcaattcaacaatcttagccttaatttcgtcataatcatcgggcttaactggaacttctttagttactgtcttagtaataactttttgttctggttgctgcttagataattcagaattacgtttgttaagctccagttgcactttacgattgtcctctaattcagcttgttgattagcaattgtttcgtcacgatcagcaagttcttgttcgcgttgtttgagtttagcttctagtgctttgtactctttatgagttttaatatcaccgttaaggactttcttagttaactctggatcagcacttggcttcgaaatatcataagttaatgacttgggcagagactcaaacgcttgtatttctttactgctgtccaaattttgaacagcaacatatctattgatgtagttgtaagctgaagttctactaaagccgatgtactcaatccatttggcaaaggctccattgttatggaaactagctaattttttctgtgcatcatataagatttttccgatttgagtagcactatccgaaacaacgttcatgagctggtgagtactttgattgaggaaagctattgttgaagtatctaagctaggatcagaaaaactcgttaaaggcttgttggtattttttcccattgatagctatatcctcctttaattgttgtacatatagtcgttcaaccatcctgtttgatatgcgaattgttttgatccctttgttttcaaagaatttgtctcttagtgcatctgcaacctgccgatatttagaattgtgactggcaccatcaatttcaaaaattgtattagtgtcagggtcaaaaaagtcggcgacgtatttcttcgatccccacttggcaagaccacccttccctgttccaaaagtgacttgccgtagtagctttggaaacatcgttccaaacatgaattcgtgagtagtattttgaaaacttgggtgatttatctccggtatagtagtaacaatttgcttaatcgcattcgtgacaatcactccttttctttagcttgagataagtgcattaaatactgtggtgttacgccaagataatctgcaacggcttgaagtaaatcatatcgaggcaacgcagtattccagcgcccgatagtgccatttccgatttttaaatcatgttctatgcgatagatcgatttgttctgctcacgggcaacctctttgatagctgtatatagaggcacactttcacctccctagtgtgagaaaactgcctaattcttttgcctattagtattgacaaataatagactaaaatctattattagagtataagaaaaacaagggaaaccactaaggctcctaaatcagaacagttatcgtaattgctatgtgctccctcaagcacaattacagtatattagatttgtgcctaatggtcaacccctattttagatttgtttctattaggagtgactttaatgtctattaaaagcagaattcaaggcctagccgcacaacgccacgagacactcgccgaattggaaagaaagctaggtataggaaacggaacaatcacaaagtgggataaacgatcaccatcatctgaaaagttggcggcagttgccgatcactataatgttacaactgattatcttctaggacgcacagatactccacaatttactcggaaagatgaacgagatgtacaaaagatattagaagatattacaagaggattaaataataaatctgatttagcgttcttgaaaaatggaggcgaggaaattgacccagaagacgctgagttattaagtgcctcgcttgaaaatgtaattaggcagtctaaactaattgctaagcaaaaatttacacctaaaaaatatcgaaaagataaggattaatgaggtgacttatatgttatctaaagaatggattaaacataaagctcacgaaatagtctattcaactggaacgcacaatccttttaaaatatgtgaagaaatgggtattccttattattatcatgatcttgggaaagaaattatggcttatcatactaaaatactacgagtacctgctattgttttatcaacacgaaatagcaattttgaaaatagatatgcatgtggacatgagttaggtcatcatttttgtcatcaccaagggaatactgaatgtcttaatagaagcaatcgaaaatttgttacttttggtgaagaatatgaagcaaacaaatttatggtagatatgatgcttgatggagttaacgtccatgattttgaaacaagggaacaactaatgagatactgtcgcatcccttcttgggccgaacggtacattgattgggaattattagtttagccgaataagaaattggggggattattctatggaaaataacaaattacgcttatgggcaatgcatcatccactaaaagcagcatattgttggagctttattgttttaatttttgttgttaatctcaatatttcgggtttactcttaaacttcatttttattttgatgaccattatatggatatcatctgatatccaatcacaacttgcaactaaaaaaagagctattaatattcctaataacacttatcgtaatcaaattgactttagaattcctctatacttaaatgctactctatttgcgtatcttgctataggaagttttgttgaaggaaatttattaattggcatttgcttatcattaattgctatctgttcttttataccctttaattatcaagacagtgagtataaccatatgcttaaacaaagcaataaattacatgaacaagacgaaaaattaaataatacaccacccactaatcaagttagtactactcctatcttgaacaccgatgttgaagtttcggtgcctaccaacgttgaaaaacatgttttacaccataatgagatcgacttgattaaggagcatgccaaattagttaataacaacataacgcttaaatcgaagaaaaaaacaaaaactactagtaacacactatatattgatgtagcaggcactaactattatcgattaaaaaatgccgttggttatgcaagaagtaatgatttgttttttgtaaggtatgatgatatgacagcatctgagatccgtgaagatttttatactgatgatgatcctgtctatgaaacggatctcactgatgtaataaatgaaatcaaattaattccgatctatgtaataaatatgatagcaatgccgttaaagtcattatttacattgaatctcaatcttttatgatcggatacattcctaaagaaaactcaaaagatattaaacgattaattgaaaaggaaagggcagatttagtaaagcttacggtaaaaggatatatgactggtggaaagtataaagcagtcaatcttgatgaccatatttatactggtgagaaaccttattcattcagtcttcaaatttcagtagaaaaaacaccttttgctcaaacaagtaaagggaaaaataaggaacatataattgatcagaggaacgaattaataattcataaactaagaaaaccacttaattcgtttgtgtcagtagatatagaaactacaggactaaatgcatcttttgataaagttatccaaatttctgcagttaagtatgtagacgataagctaattgatacgtttaatagttttgttaatccgggtaaagagaaattgccactcacagaatttataattaataaaactggtatcactactcaaaacgtgaaagctgcaccaacttttaatgatataaaaggttcatttgaaaaattcgtaggtgatcttccttggatcggtcataatatctttgcttttgatattcctttcttatatgaaagtggtctttcaattaacgagttctatgccgaagatacttttataatcgcacgaaaacatttagatcgaacagtattaggaaatttaaaattacctactctaaaagaatattatggcattaatgagccgtcacataatgctctagctgatagtaaaactgctgcacttgtctataagcatctcagagatgataagttacctaaaattcttaaagatgctaatgataagatgctctcattaaacggtattcatttcttagtaattggtagcttcccagaattcgatcatgatcaaatgattgagcaaataaaattacgcggtggtatcattgaaaatcgctggactaacaacactcaatatttaataaatggtattactaataagcattacaaatctattcaaaatgcaaaagatcataacgttcaatttttaaattttaatagtcttgttgctttaataaatacaaaagatcaacaattacaagtattcgataactaatgaatttaaaacggtcaaatccgtggccgttttaaaaagcacgttaaaagaacacctgtttgcattttaaggaggtgatgtcctatgaaaaataaaaaagcccattccctactgcaataggaaataggcttgactaatttcaccaatcttcactgcaatggagattgattgaggagttaaaaatcagttatatcccctaatttttaactccttcattataacatttatgtttatttgaatggaggaacgttttcatgtggattaattcgtataaaactagcaaaacaataaaaggcaaaaacgttcaagttatacattatcaatttcttgaacgttacaaagatcctaagacaggaaaaaataaaacagtttcagtatcatatgatcgaaatacgccccaagttcgtaaagaagcaactaataaactagagaaaaaaatagaaaaacgtattagggagataaaatcaagcaataccaatattacgttacaggaactgaccgatgaatttctcgaatactataagcatcgagttgctcttcgaacttatataattaataaaaatgttctacaaacaacatgtaatactcttggaggtgacacgttagcaaaacgtataacaactccaatgttaaataaatattttgataatcgcctttatgataaaaagcacccagtatcaaatagtacagttagaaatactcgcaaagccctatcattagcttacaagtttgctaatcgttatggatatttgaatattaatcctgtgaaagatacggaagtgaattggcgcaacgaaatagatgcacggcgaaatagaattgaaaacaaatatttaactcatgctgaatatcgtaaaattatcaagtattgtctcaaaaagcacaaacaatactatgccgacgcttttaagcttcagtatcttacaggtttacgttttggagaattgattgccttacaagttaaagatgtgcttaaaaaaagtggatatacttatcttgatatcaatggaacaatggtagttaccgacgatcactcaaagcagatcaaatcagatcgtacaaaaagtattgccggaattaggcagatcatgctttcgccaaaagccataactattgttaaacgcaacatgaaggataaaaatccagatgactggttaataacccagccactcacacctaagcgtccagaaagaccactgagattaaatacagcaaacgtctttcttaaaaaagcttgcaaagaattaaagataaataaaaaagttactactcacttttttagacacacccatgtatcaaatttagctgatttaggaatccctttgcgggtaattcaaaaaagagtcggacacgctgacagtgaaataacccggcggatttatttacatgttactaaacgtacaacaaaaaagtttattgatatgatcgattcaattgatgagtttgactagcaataaaacttttcatttctgctatatttgtgctatataaatcaatttaaaatcgagtaggagataattgattagttcaattatcgacctctcacaccaccgtacgtacggttccgtatacggcggttcgacaacttaatcacattgaattgactggagcgtcttggacatattcataagtccgagttgttccagttttctattagttagagaatagctcaaggtcttactgtgtgcagttcgccagtagcccttgcgggtactagcgaagacatatgcatcacgctgggacagccccagcttctgtaagttagttaccttagttttaagcttcttccattgcttccagatatactgtcttattcgggccctcaaccacttgtcaaggcgttgaataaagtcagttagtttcccaattgagtagtactgaagccatccacgcatttttcgatgaatttcttcaaacattcttgtcagggatattccacgattacgtttagttaataacctcaatgctttctttactcgttgttgcgattgttttgctggacgggcgtaggctccattgtggtctacacccaacgaaaagccaagaaactttaaccgtagcgggctaccgactttggttttatctgggttcactttaactttcaatcgcttttcaagaaactgggtaatgcttcgcattactcgttctccggctcgttgacttttaacataaatgttacaatcatccgcatagcgcacaaagtggtgaccacgtctagtcaactctttatccaactcatttagatagatattcgccagtattggtgacaatggccctccttgtggggttcctttttcactcttagcgaaaagcccatggtctaagactccgctagttagaaacttacgaatgagccttagtgtccatgggtcatcaatatattgttgaagatacttaatcatcaagtcatgattaacattatcaaaataggcttttaggtctaagtcgacaactcttcgataaccttgattataaagatctactacttttgcaatagcgtcgtgagccccacggtgagggcggaagccaaaactattatcagagaaaacacgctcaaagataggtgtaagaatttgggccacagcttgttgaaccattcggtccaccactgttggtattccgagttttcttactccaccattaggcttcggaatttctacccgtttgactggtgctggtttatacttgccctcacgcaaactagcgatcaattccgtcttattttctctgagatatggcagaaggtcattgactgtcatatcgtcaatgcctgctgcccctttatttctcttaactcgcaaataagcctgattaaggttattgcggtccaagactaagtcttggatagtgacactcatacctttaccttcaccataatcggtactacgcgcccttgtgtactttcggttttccaaacctatcctcgacaagcggtcagcttgttgttctgttttctgcgattgtcgcacctgattacacctccgatataagttacaagttattgtcgttcagtccttcatctgattactcagactactatgacctcggctgacttctggcttactcaacgctacatcactgcaccgcttgtttctgtggaaattaaacttattcctcttgtcggaaacgtgtaggccagatctcccgggtaaggatattaactttcgtaccatgtcaccggtagctttactgaaagtaacttcgagtagtgttggactttaacttgtcatgcagtcttatccagttagttccagccttatagctacttcttgttcatcggtgcagtactttgccttagacttccttcagattccacctcgcagtggacacccttgtcctcagctcatggttccgactactacggcccatagcggactctcaccgcctagctaatacccatgccgggcgcacacgaaaaagaaacccttgtaagtcgtggcatacaagggtttctttttcgtttttcatcttgtcttgaagacaaacgttttatatttttacaagtcctattctaataggcttttactgtcatgtcaacgtttataacttggcttattttccgtactattccgtagttttccgtaaaaccagatatcttctgccccctcagtgcgccttcggattatttcacaaattcaattttactttttctttaataactgcacttcttcaggctttaatgcacggaattcacccggctgaagaccatataaatttaatggtccatatgtttcacgatgaagtttagtcaccggatgtcctactgccttaaacatattcttaacttggtggtttcgtccttcgtggattgttaattgaacaaggcttgtcttcttggcacggtcaacattcaagagcttcgatttagccggttttgtctttcgaccatcgatgactacccctaaacgtaattgttttaactcatcatttttgacgattccttcaaccttagcaacataggttttttcaacttcatatttaggatgcatcagtttatttgccaaagcaccatcatttgttagaagaagaattccagttgtatcatagtccaatcggccaactggataaatgcgttcatcaatctcagcatcatgaataatatcaaccactgttcgacggcctttatcatcatgagcacttgagataactccccgcggcttatttaacaagtagtaaacgtgctgttcgtgatggattggaacaccatttactacaatctcatcgtgaacgctaactttagtgccaagttcagtcacaatcttgccattaactgcaactttcccttgaaggataagtttttctgatgcccgacgagaagctactcccgcttccgccattgccttttgtaatcgttccattaattatcgtcctttcgttcttctcgcgcctgtaatgcttcaaggaaaatatctccattaatattgctcatttctaattcgtcttgatcggtaacggtgggagttcatctaaatcgcttaaaccgaaatagtttaagaaagccggggttgttgaatataaaaatggacggcctggtgcatccaaacgtccatgagtgtcaactaaaccacgaaccattaatttttgtaatgatcctgaactttgcactccccgaatatcatcaatttctagccgcgtaattggttgccgataagcaacaatggccaatacttctaataatgctttagtcaatggtaccgttaacgggacttcaaagtaatgtttaatgacctctgctaactgaggcttggttgctaaacgataggtctgatcactttcaagcaagataaaagcagatgtgggatcatcttcatacttcttttttagctcttgtaatattgttagaacagccggtttcataaaaccagaaatttttgctaaatcgcctagggtaattccttcgtccccactaataaaaagtaatccttcaatctgcgcttggttggttagtttcgtattcgtcactcttagatccctccgctaaaattattggttcaaacaagccaccttggttaataacaatcgcttgatgctttgccagttcaagaattgctaaaaaagttgtaactaagccatcgcgagtatgtaaatcttcaaacaagtcttcaaacctaaccggaccatcatgaataatttcaatcacgtggttcatttgttgaccaacgcttactttttcagctgctacagtttcaactaatggagtagctaattgttggcggcgaagaacggctgcaaaagcttgttgcaaatccgttaatttgatgcccggctccacgtgagattttaccatttcacgtggaacttgcattgctggtcgagtatactcctgttgacgcagattttctttatcttttagtcgatctgccgcttttttataacgctgatattccaaaagctgttccactaattcttgtcggggatcaagctcctctacttctagttcatcatccaatactggcggcgaaggtaacagcatctgacttttaatgtccatcagagtcgcagccattacaaaatattcacccgcgacttctaattggtggctttgcatctggtgaaggtaatcaaggtattggcttgtaatttgcgaaatctgaatatcataaatatccatttcagattgctttattaaatggagcaataaatctagtggtccttcaaagtcatgaacctttatgaccggttgaaatggattttgtggttgcacttgcttattcattacttctctcccacatgctaattattggttgggttgctaaggttcccatgaggcgtttatgaggatattgatcgtgaacgccatctaataaggaaaaaatattataccccgttcgttcgcttggcgtaaacgataagcggcgaaccagcacgtaacaatcccctatttctatcatcacaattccaataaagtgactatcatccatgtctttccacaaaaagattggccaatcattagccagtgcccagtccatctcttccataaaacgattatcttttcgaaggtcttttactaaggacaataaacctagggcgattttttggtaatcttttcgataacgaactaacatcgtattttcctttctatgcacgaggatgatatttcatatagttagcggataactgttgcggcgagacctgtaaatatggttggagagccttcatcgcgttataaccaaggatttcttggattaattgaacatcggcgccattttctattaaatgaacagcaaaagaataacgcatagtttgaggagtaacttcttttttgattttagcctcactgacccattccttcatttttttccaaattccttgccgcgtcaaaggataaccatgagcatttaagaacacccgagtttcgtgatcatctctgagcaaaagtggtcgaccacggtttaggtaaccggtaagccacttgactgctggttgacttaagggaatcatccgctcacgttcattctttcccgttagttgtagaagcttaacgtcgagatgaagtgctgtcagatccaaggcaattacttcactaaccctcattcccgttgcatccataatctctaacaacgctcgatcacgaagaccaattggggttgaaacatccgggactgccaacagttgttcaatttctttttcagttaaaattaccggtgcaggtggttggttaaaggtatactggtgatcaatcatttccattggattaatggttaggttatggtgacgaatcatgtatttataaaattgccgtaaacttgaaatcacacggttaattgttgaattagcttttccctgctgacgaagactattaaggaggtcaattagcaaatagtggtccacctgttgccaatcatcaattcctcgatcttctaaataagtcacagtttgttctaagtcccgttgataactcatcaaggtattatcgcttaattgtcgtttatcttttaaaaaagctaaaaacgcagccacttcattattcattaatcttgattctcttttactaggattaattgaccgttttcttgttttactaatttctctttaagcaaatgcccaatagcacgtttaaactgccccttgcttatgccaaagacatcgcgaatgatcgatgggtccgtcttatcagtgtatggcaagcggtgatttataccatgttctaacattgtcaaaatcatttgtgcatcttcaccaatagcttggtaggcacgaggcttaagggagagattgagactaccatgtgacgaaattccaataacccgcgctttaactcgttgacctaatcgcggttcttggtctcgttcacttggatggatgaatcctaaacgataatcatcagtaatcacaaaggttccactcatcttaagacggtaaactgtggcataagtatcatggttgagcaagcgtttatctggagctgctgaaatagtttgatagatttggtcatctgctaatttaccccatagacggtccttatcatcaacttgaagggacattaataaacggtcacctggttgtggccataagtgtttcaagcttggtaaatcatctaaagagacgacaatatccttattgggaagaccgatatcaacaaaaacccctaaatcacgacgaacattaactactgtaccataatcgtaatggtcaacctggatcgttggaatgtgtttacaggtcatctgtagttggtggtcctcattttcataaacaaagccgcgtacctgtccaccaatatgtaattcttgaggactttcgcttttcggtaatcgatacgtttgcccattacgatctggttgaacaaaataatcggtatcattttcatcaatcattaccgctgtaacaacttttcctaatgctgaattcatttttatcacttatccttttttattctatatcgattttacacggtaaaggcttattttgctagtaagatcaatgattatcattggtataaaaaaagaccggttactaatgaccgatcttttcgcagacaatattataaaatattagtcgatagtcttaacacgcatcatgttagttgcacctggtacacccaaaggaacaccagcaacgatgatgatcctgtcgcccttcttagcaaagccaagttcaacagccttcttagcagctaagtcgaacattgtatcagtgttcttcatttcatcaacaacgtatggttgaacaccccagttgatcataagtccacgttctacacgttcgtttggagttaatgcaacgatatcagcattaggacggtacttagaaatcatcttagcagtgtagcctgaagcagtgtaagcaacaattgtgtgaatgtctaagtctttagctgcgttagcaacagcagaaccgatagtttcagttacgtcagacttgtcccaatcgaacttttcagtaccgaattcccaaaggtggttttcagccttgatgtcaatgttgttcatcattgcaacagattcaactgggtagtcaccgttagcactttcaccagaaagcatagtagcatcagtaccgtcaaatacggcgttagcaacgtctgatacttcggcacgggttggacgtgggttttcttgcattgagtcaagcatttgggtagcagtaataactggcttacctaattcgttacaacgcttgatcatgtgcttttgaacaattggcacattttgggcaggaatttcaacacccatgtcaccacgaggtaccattaaaccgtcagaaacagcaatgatttcttcaaagttgtcgataccttcttgagattcaatcttagggaaaatttgaacatcttccatgttcttttccttaagtaattcgcgaatgtcaagaacatcttgagccttacgaacgaaggatgcagcaatgtagttgatcttgttttccaaaccaaaacgaatatcgctactgtccttttcagtaatacctggtaagttgattgatacaccaggggcgttaacacccttccgagaaccaagaacaccatggtttaagacgtgacatacaagttccttgtttgcatcgtctttttcatcaataaccatgtcaattaaaccatcatcaaaaagaacatggccaccaacatgagtatcatcgtataagcctgggtaggtaacagcaatcttgtcatgagtaccttcaattgaaggatccattgaaatgcgaaccttgtcgccaatttcaaagttgatcttaccttctttttgaacagtagtccgaatttcggcacccttagtatcaagcataagaccaacgtgcttgccagtaatttcttcagccttgtgtacgttttcgatccgacccaagtgttctgggtggtcaccgtgtgagaagttgaaacggaaaatgttagctcccgcattgatcaacttaacgatcgtatcaacatcagtacttgcaggaccaagtgtacttacaatcttggttttcttcataaatgaatctctccttttgcatctatagcatcaatcacaatctgtaattgtatgcctcatttgcacactgttatgatagcacttttcaaataacgtgtctttattttttatgcaaaaggttttaaaaaagcgctatcattctaaaattagttattttttctaactgttatttaattttatagctttcagtgattactattaagctgttgtaagacaacgttttcttggccaagaacggcgacaagcgccttttttgctttctgagaattttttaaccatcgtttttggtcaagcaggatcttcttatcgtttgctggataaaacaacaagacaggaattgaaccatggtattcattaaaaatattatttaactctcgatgcaccatctcagtgtctaatgacggtaagattcgtaaaacccatcgttgcttgcggcgtttctgttgaacttttttaacatcctgcaattgattagcaactaattgtagaccccgtccctcacgatattctactcgacctctgacaattaaaatcttatttgtttctagttgctctttgaactgctgatattgtttgggaaagacggtaatatcaattgctccggtctcatccgttccattaacaaaggccatttcccgatgttcacgtttagtataaatagtcttaacgtgatttgtaaggacaattattgtcgcttctgaattcgggtataaattagcaattttagttgcatggagctgctgtcctaattggtaatattgggtaaccgggtggccggaaagatacactcctaagtattcattctccttcgttaaacgggtcaacagagggaattcatttcgttggtcaattgccgtttggagagccggatcgtcaaaattagcaaaaccagcaaacaactcaatcccggaaattaatttaggaagggcgtcaatcatctccgctcggttatattccatcttatcaaaggccccactatagattaacggttcgattaattcttgcttttgccaacgttctggaatacgcgcaataaaattacgaagatctgtaaacttgccattttcctgccgttcttcaagaattgcggcgacaaaatcacgacgtactcctttaatagcagaaaagccaaagtaaactgtcccatcatgtaatagaaaactactctcacttatattgattcgcggcccactaaccttgacgccaaattgctttgcatcccccacgtgccgtttcaatttctcaatattagtttctgcattcattagggctgtaaaaaaagctgcagggtaataaactttcaaatatgccatctcaaacgccatcatagaataggcaactgcatgcgaacgattgaacccataattagcaaagcgatcgatatattcaaatacttggtgagcaacttgtgctgaatagccgtgttctgttgcgccggcaataaattttgtccgcatatcctccattgtggcctttttcttcttactcattgcccggcgtaaaagatccgcctctcctaaggtaaagccagccattaccgaggccaactgcattacctgctcttgatagaccaaaataccgtaagttggtcccagaattttttcaagtgaaggagcaggataagtaattttctcttttctagctttgcgggcggtaaaatgagaaatattttccattgggcccggacgataaagtgcattcactgccacaatatcttcaaaattcgttgggtgaagattgaccaatacatttctgatcccacttgattcaaattgaaaaatcccttcagtttttcctcgctggaacagttgaagagtcaacggatcattaaagttaattttttgcaaatcaaaattagggtcttcttgccgaatcatttgaaggatgttatccatgattgaaaggttcttcaatcccaagaaatccatttttaatagccccagcgcttctactgtgtctttggcaaactgcgtcattaataagccatcactaccatcttgtaacggcacaatttcatgtaatggctgctcagaaaggacaatgcctgccgcgtgaattgaataatgacgcggcaatccctctaattgctgtgcaacttgaattagcaaacgaaatttaggattatcgtcaagaagattttttagttgttgtgactcctttaatgcatctttgagtgtcacgtgaaggccatgtggtaatgcatcgattaacctttgcatatcgtaacggggcaagttaaagacccgactcacatcacgaacgacttgtttagcggctaatgtcccaaaagtaataatttgggctacgcgttgatgaccatatttttgatgtacatactgcaaaacttcatcacgccgattatcaggaatatctaagtcaatatcgggcatttgagctcgttctggattcagaaagcgttcaaataataagtcgtattgcaaaggatcaacttctgtaattgctaaagcataggcaactaatgatcccgcagctgatcctcgtccagggtcggtcgtaatcttttgctggtgagcaaaattcattacgtcccatacaattaagaaataatcatcaaagcccatttcatggattacttttaattccatcgctaaacgttcttggtactgttgaatagtttttcctggtgctactcgtctttttttcaatccttgaatacatagagaacgtaaatattgttgagatggtatccctgcttgatttttaaaatgaggaaggaccggggccctaaattgaagttcaacgttgcagagggctgctacttcaactgtcttttgcgcggctgcactaagtccctttgcattgtaatcttggacaatctgttctttcgaatgaagataatgttgtcctcttcgtcccgcttctattgtcggatcttttaactcaactccggcatcaattgcttgtaaaacccgactagcaaaaaggtcattagcatttaaataatcaactggagacgtccctactaatggcaaagatagttgttttgataattgttgcaaggtatctatttgaacgtcatctaaccgcgaattgactcctaacagaacgctatcatcatcccccagattagcaagctcagttaaaattgatgttggctgagcaagtatactaaaaactgtactttgtgggggataattataaacaattcacccaataaacaactaatttgcgcaatcgttaaaggtatttttttatcttttcgtgtttgctgaagcgtcgataggtctatcagatgctgataccctcgttgattcttagctagaaatactaaatctagcttggtaccatccgtctcatttaatgcaactaccagccgcaagccgagaatgggtttaattcctgctttttttgctgcattataaaattcgacagccccatataaaacattttcgtctgttaacgctaatgccttataccctcgttccttagccgttgtaactaggtcagaaatccgggtgggactttttagcaaactataactactcttaacatctaagggcgtaaaatccacttcatttcacctctcaataaaattatatcaaatcaaactaaatagagaaattaacccaaccctttcaaaagcattaataaatatgctagaatatggtatgacttcaaaggggatgaccaacatgaactttttattaaagaatatcgtggctggtatttgggcacttattctgggtgaggtcctagcttacatcacaagtcaactagaatcgatgacaccagactacacccttgtcggctggtgttctgtaattatgggattagtcgttatcaattgtgtggataaaattaccgcagatgcaaatcctagcaaaaatgaagattaattaaaaaggattgagtccaaaatggctcgatcctttttaatttatttatcttcttccgcagtcaaccgcacaatctcaagcagggtgtccaatgcgcgttccatcgtttgcagtgatacatattcaaaacgcgagtgcatgttttctccaccagcaaaaagattaggagttggtaagcccttataagaaattgttgaaccatccgtcccgccacgaactggatagatatccggtttaatgtctagattttccatagctttcttcgcaatttcaacaacttccatgtgattcttaagcgcatcttttaagttgtagtattggtcataaagattcatcgttactaggtctgcaccaagttcatcatttaggccagcaacaacccggtcgagtaaatgcttccgttcaataaacgtttgcttatcatgatcacgaattaaatatgtcattgaagcatgatcaacagttccatcaaacttgtataagtgatagaatccttgccgtccatctgttcgttcagctcgatcatgtgctggcaagctattttgcaagtcaattgcaacctgaatagcattgatcattgttcccttagcaaccccagtgtgaacatcttttccttgaatctcaatttctgcctgagctgcattaaatgtttcatattccaattcgccaagtggaccaccatcaaccgtataggcaaaatcggccccaaaatccttaacatcaaaatgatcagccccggtgccgatttcctcatcaggtcctaaaccaatcttaattgttccgtgcttgatttcaggatgagccatcaggtaagcagccattgtaacaatctccgctactcctgacttgtcatcagccccaagcaaagtagacccatcagtagtaattaaagtattgccctgatatttttccaatgatggaaattcagtagtagttaaggcatattggccatctttatcaagcttaatatctgacctgccatcgtaatctttgacaatctgtggattaacattatgagcattaaaatctgcagtgtcgatatgggcaatgaagccaaccgttggcacatccttgtcaatattacttggaattgtagcgaccaaatatgaactttgtggattaatatgaacatcactcaaccctaaagatatcaattcatcttttaattcatcccgaaatgtcaatttaagttagaaagaaagtagttgctcatcagtgacgtaggacatgaatacctcatatggagttcgatagcctagtgatttgcggggcaggttatttcgcttactcatcagttgggtcaccaattcatcaggaagattgcggaaatctagctgttttgttaagccgtcccggcgtaaaagaccgttgttgttttcgttcagccctcgttgattgggagcaccaacctcggcaaagtaagtgtgaaggtcaaattgattggcaatctcgcgccagccggcgaattcttttccgttgtcaaaggtaatcgatttgaagaagtgctgcgggaatttccgaagccactgacctaagtgttggttaatcgcatcagccgtcttttcgtgcacattgagtacaatttcgaccttcgattggcgttcggtcagggtcattaccgccccttggtgctttttgccttggacggtatcagcttcaaggtgtccaaattcagtggcatagtgcggaaagtccttggcacgctcgtgaatacttcgccccaattggccagccttcccgcggcgctcaatatagccattcgggtgccgcttacctcgcatgggcaaagcacggacatccaaaccgaactgcccccgttcaaacatccggtaaagagttcgccggttacaactaattgggcgctcagcgcgcccaataatggtgtcaggcgtccacccctgggcaattttgtcgttgatataagtaagttcagccagtgacaactgagtacgttttcggccacaacgttgcttattgcgcatatagtgatcttgataatcagcaattgaggcaccggtttccaggtaacgataaacgcgataaacggtttcggcgctacggttgatcatttgggccactcggtacgctttaagcttttgcacgaaagaatgggcgatgattgtcagctcgtttgtggtaagatgggtgtaagtcatttgtggtttcctttcttttgtttaggggtattcaaaagtctaccacaaatggcttttctatttttctaacttaattttacaaacggcgcatttaaaaatgcagtttccttaggatcagaaggaattgtttttgaatctggatttgaccttgtttcagttttaacatacttcaaaaaacgtggtaataacccctcatacttttcctcactcatgattagcatctccttatctaaaacctatttagtaataaaagtaaacggctctgtattaactctactctctagcacctcaaactgccaattattttcattcttccactgggtgattaagttagcaagctggtgggcagctaccacttcaatatgatgtccaggatcaataacaacaaggtgattagcaatcatatcgtgcgcaaagtggtaacttacatctccagtgacataagcatcagctccagtttcaagagcttgttgataaaaatcttgaccagcaccaccaagtactgcaacacgtttaatctctctctcttggtcaagcgggttgacaattaaccgtaatccgcggatgccaaaaacatccatacaataatttgcaaatttttgcgatgttaatggttcattcagctcaccaacacgccccattccaactggttcaccgcttattggatcatttcctgctggcactaaaggcacagtattagttaggtgaagttgatctgctaaccagtcatttattccgccattagcagtatccaaattcgtatgagctgcataaacagtaatattattcgccaaaagtttagcgtacattgcattttgcggatcccgcgtatctagattctttgctgggtgaaacataatgggatgatgagcaaaaataaagtcaatattttgttcaattgcttcatcaaccacttctgggcgaacatcaagggtggtcattagtcgagtaatcgggagatctggattgccaatttgtagaccgacatgatcccatttttctgctagttgcggattagcaaatttttcaaaacgcgcaattaattggttaccggttgtcatcggcgatcgcttcctttacttgtgataaaaactcgtttatctcattaatcttttttactggtggctgttgagccttttgcatctgatcaataacatgggcttcacgttgaagatattcttgccattttttcctaaaaacaggccctttgttttccaataaaaatggtccaaaatcaagctcatacttactgtatctaaatgggacaactgatggctcagcaacgataatctcataaatatgattgtcttcttcaattattttttcgttcattatttggtaataattattcattaaccattcacgcaactgactttcccctacattcggttgaaggacaagtcgcttaattcctgttaacttattcttgtctttctctaaaatcgaagcaatcaaactcccgcccattccggcaatcgtaattgtatcgactttatctgctggttcaatcgctgctaaaccgtctgccaaacgtgggataacctggccttctaattggtggtcttttatttcacgaacggcattttcataaggaccctttactacttctccagcaattgcaaaatcaattttaccatctaacaccaatgcggctggtaaatacgcatggtcagaaccaatatcagccacccgcgcacctgctggaacaagggaagcaacacatgctagacgtgctgataagtgcttttcatccacaaaaatcattcctttatctatttaataaattaattataacaaaaagaggaagcaagatagcacccacttaggagtcctattcctacttccttctaatttacgcaagatggtctaaaaattcaccaattcgtttaatagcttctgttaggttttcatcagaggaggcatatgacagacgaacataaccatcgccacccttaccaaatgcactacctggtgttactccaacctttgcttctttagcaagctgctttgcaaaggcaacatcgtcagttccaaattgagctggaatcttagcaaaaaggtaaaatgccccttcaggagttaacatttcaaagcctaatttcttaagaccggcaacaagtaaatcgcgacgatgctggtaaatctttcgaaattctaatggatcatttaaaccatttgtcagtgcttcagccgctgcaacttgaacgttattagttacggttgtgactaagaaggcatgcatctttgaaatattagccatgatcttagccggagctgcaacatatcctaaacggtaaccagtcattgcgtgagattttgagagtccagagataaaaattgtccgctctggaatcatagtagcaattgaatagtgctctaccccatagactagttcgctatagatttcatcagcaatcgcatataaatgatgcttcttaattacttcagctaatcctgctagaacttcttgaggatattcacgaccagttgggttacttgggtagttaaggataacggctttgacgccttttccctcttcttcaagaacttcttcaagcttttctggagttagaacaaaattatctgctgaagtatcaacctgaacaactgttgctcctgtcatttcaattaatgggaaatatagagagaaaatcggggtcggaaccacaactttgtctccagtattaaggattgcaaataaagttgcatcgagggcttcggttgctcccacagtcgcaattatttccgtttgcgggtcatagtgcacatcacgagtattctgaatataatcactgattgcttcaagtaattctggctttcccatttgaggagcatagtgagaatcatcttcctcaatacttctaatggctgcttgcttaacgtgttcaggagttgccatgtctggttctcctaatgttaatttaataattcctgggatctttgaaacttctttattgaattcacggatacctgatggctgtaatgcatctaacttgtgactaacagttccatataaatcagcagataattctggcattgttcgatctctcctcaatttttatttataatagatttaaaaaacgctttataaaaattttacccgaacaatcaaatgttttcaatataaaaataagatttctctcatttattttaaataaaattaaaaagtagcttaagataattaattaacttaaactactttttttagtgtaaatccgtcttttttacgtatatatattaaatggagaatatttttattctaagaaatcttttaattgcttagaacgtgatgggtgacgtaatttccgaagcgccttagcttcaatctgacgaatccgttcccgcgttaccccgaagacttttccgacttcttcaagggtccgtgtccgaccatcatctaaaccaaaacgaagccgcagaacattttcttcacgatcggttaacgtatccagcacattttcaagttgcttcttcatcatttcataagcagcatggtcagctggacttgttgcatcttgatcttcaataaagtcccctaaatgagaatcatcctcttcaccaataggcgtttcaagtgaaactggttcttgggcaattttaagaatattccgtactttttcagttggcatatccatttctgcaccaatttcttcgggtaacggctcacgtcctaaatcttgaagtaattgccgttgaatccggatcaatttattaatagtttcaaccatatgaaccggaatccgaattgtccgtgcttggtcagcaattgcccgtgtaatagcctgacgaatccaccaggtagcataagtagagaacttaaatcctcgccggtaatcgaatttttcaacggctttcataagtcccatgttaccttcctggattaagtcaagaaactgcattccacggccaacataacgctttgcaattgaaacaactaaccgtaagttagcctcagctaattcttgtttagctacttcatcacctttttcaatccgtaaagcaagctgaacttcttcatcagccgtcaaaagatttacacgaccaatttccttcaaatacatccgcacaggatcattaattttaactccagttggagctgatgtatccttcatagcagattgtgagaatttttcagtagcctttaaagcacgaggatctggatccccattttcatcgacaacactaattccggcatcttcaatatttgaagtaaattgtcaatcccatcagcgttcaattcaaatggtttagcaattttagtagttaattcatcgtactcaatctgcttttgcttcttgtaattacgaattaacttaccaactgcggtgtcatattcttgttggtcaaaattggcgctgttagaaataacaatgtctttttttttgctttttgccatattaattagtctcctccgtttttaagcgttgctgctgctttaataattttaccagttcaatcgttaattgcgtagctaattctgtattatgcaatgaattagcttcttttaactgggcttgcttatctgcaatttgcgcagctaacggtgtttgttctacgatcatatggatacaatcatcaattgctcgcatatcaacttcttggtcaacatttaaattctcaatttgcccaagagtaccttgtaaactactttcatctaaataatcaagaaagtcagcagttgaatacgagccattttcagaaaaataacttgctgctaataaatacaaagtttgatatttctcatgtgcaaaatgaaaattgtgatctgctgtcacatgcatccatacttcacgatcatatagcatgtaccttaataagatctgttccgctaattcagtcctactaagtttaattttttgctgttcttcttcactagtttgttgaaactgttgatgacgagctagtgaaggctgttgcttaatccatggctgattatgaattcctagttgttgtcgcaattgatctaactgcgtttttaaggtttgtcgatctaacttgaactcacctgccaaccgttgcaagtacatatcttcttctaagggagcttgaacctgagcaattaccttcagcgctttggttaagatattgcattagttcattctgattatctaaatttttcccatttcttaaaaagtgcaggtaaaattctgttgttgtttcttccttattcgtaagataggcattgaattgctgtggtccatacttttgaacatattcatctggatcgatcccagccggcaattggacaacctttacctgcaactgattaggtcgatgatcattaacgaggctaattgcacggtcaattgcattttgtcccggttgatctccatcgtagcaaatgtctaattgcctagttgctcgaccaataatcgctacttgctcttcggtaaaactagttcccattgaagcgattccattttcgatccctgcagcaaaggccgagattacatccataaatccctcaaataagtataatcgaccatctttacgtgccgcttttcgtgcaacatcaaaattaaataatgttcgccgtttattgaaaatcggtgtctcaggactatttaaatatttgggtaaatttgttttactggtatcaattaatcgcccagaaaaagcaattacctgcccttgaccattttttattggatacattatccgttcaataaaccggtctcgcaactctccttgttgatcttcactaaaaagtccactttttcttagcaattggtaatcaactttttgctgttggaagaaaggcttcaagattcgctgatcaggagcatagcctaaaccaaattgttcaatcagctcctcactcattccccgtttttttaaataattaagtgcaacttgcccagccgtgtatttaccaatatatggtgataaagtttagccgctttatcatgaagatcaaacagctgtcgattctcgtttttaatggtttagccggaacgctaacatattgttcaggaattgatattactatcgttagcgatctccttaactgcatcgacaaaatcgatatgctttaactccatcaaaaattgaaatacatttccgctccggtgacatccaaaacaatagaaaaattgtttttcctcattcaccgaaaaagagggggtcttttcatcatgaaagggacataacccaattagattttttccagcctgatgcagttggacatagcgcccaattacatcaccaatatcaactgaatttcgtatttcatcaattacattacgcggtatctttgccattgatccacctcacttagtaagcgaacagcaacgaaatgaaaggtcgcaacctaacggaatgcgacctccacctatttttacatttaactagtatctataataccacaagttagcagcaatacaattaaaacgtcttattttacaatcaagttatccaagttaccaattaatgatgcttgattagccaaaatacttaattgggccaaacgattattacgaatatcttcattcttatccataatcatattttcatcaaaattcactaattattggtgttaaagtccgtaaggctgcaaagttttcacttactgtctgttgattttccttaatcaattctgaaacagcagtatgcatcttagcctcagatgggttctcaaataaattaggatctactacaagctcactaactggacgtttatccttctttgcaatccgtaatacccgggtaagagcttcaatatcttctttaaagttatcatcatccttatgatcatcaatagtttgaatagcttcaaggatattagcaatatcattttgacgagtatcggtagctgcatcaatgatatcgtgacgaaccttttgaccatggaataattgcttaatccggtccaagaagaacgaacggacttcatcactatttttattcaaatcaaaagaaacattgatttcagcgttttcaaaggcaggggcaatttctgattgaatacttaataatggaaggttccaaccacgatcggcgatgatccggacaattccaaatgcctgccgacgtaaagcataagggtcatttgaaccgcttggaatcatatcaactgcaaagaagctcatgatactgtcaagtttatcggcaattgctaagaccgcgccaatcttagtttgtggcaattctccttctgcagagattggcatgtagtgttcacgaatagctgtggcaacatcatctttttcaccgaatagcttagcataaatttcacccataattccttgcaactctgcgaattcacccaccatttgcgtagtaaggtcaaatttataaatatgtgctgctcgatcaaggtctactagttcttcatctgaaagatttagttgcttaccaagaacattcgcaatcactgcgacccgctgcattttgtcatacattgaactaatcttatcatggaagctaactttcttaagtcgttccacatattcatcaattgtcaacttctgatcttcttgatagaagaattgagcatcttcaagacgaggaacaagaacccgttcatttcctttaataacattatcaaggtagtctgtgttaccgttgcgaacagaaataaagtgcgataagaggttaccatctttatcccgtacacagaagaatcgttggttatccttcatggaggtaattaggaccgggtcaggtaatgctaagtacttctcatcaaaagatccagcaaaggcagttggccattcaactaggttattaacttcttctagtaagtcctcatcccaatcaacttgccagttgttctcattaataatcttagtaatttgatccttaattaaattctttcgctttgtttgatcagcaataacgaaatcattatttaaggtttcctcataatcatcagccttagcaattttaactggatggcctaagaaccggtgaccttgtgtttctcgaccagcttcaacgtccaaaatattaaatggaacgacttcatcatttaataatgaaactagccaccgaatcggacgaataaattgcaagttattgtagccccacttcatcaaggttgggaatgtcatcgaagtaataactgctggtaatccttgaagaacttcagcaacagtttttccagcaatatgcttttcaacaaaaacatattcaacgccttttacttctttgaattcaatatcttcaacagaggcaccttgtccccgggtaaaaccaattgcagctttggtccaattaccatcagcatcttgcgcaatcttttttgcagggcccttaactgattcatcaatatcaggttgcttatcacttaagccatggattagtaatgccatccgtcgtggagtagcgaattcttgaatatcatcaaaagtaatccgttgttctttaaggtacttttctactcgttcgtgtaactgtttaatacttggtgttacaacgtgagcaggcatttcttcaacaccgacttctaataagtatgtatttgccatcttacttttcccccttttgtgctttcttagctgcttgctttgcggcccgttcctttgctttttccgctttttttgtatattcttcaactgtcttttggcgaactgcttcgtcatgaatcagtgggaagccacgtttacgccgctcttcaacaaaggcttttgcaattgattttgccataattcgaatacggtgaaggtaaccagcacgttcggtaaccgaaacagcaccacgcgcatctaacaagttaaaggtatgactacactttaaaacataatcataagctgggtgaactaatccaagcttaattaaacgtttagcttctttttcgtaatcattaaagtcttgtagaagcatatcttggttactttcttcaaacgcatacttagaatgttcatattcaggttcttggaagatatcaccatacagaacatcatccgcccactctaagtcataaaccgagtcaacattttgaatatattcagccaaccgttcaagtccataagtaacttcggcggccactgggctcattggcaactctccaacgacttggaagtaagtaaattgagtaacttccattccatcaagccaaacttcccaaccaacaccggcacagcccattgaagggttttcccagttatcttcaacaaaccggatatcatgctctaaaggatcaatccctaactttttcaaacttcctaagtataattcttgaatattatcaggagaaggcttcattaatacctggaattggtggtgttggtaaagccggtttgggttttcaccataacgaccatcagctggccgccgtgaaggttcaacataagccacattccatggttcaggaccaattgcccgcaagaaagtgtaaggactcattgtccccgcacccttttcgttatcataagcctgcatcaacatacagccttgatctgcccaatattgttccaatgtaaagataatatcttgcacggttaattttttcgtcatactttacttctcctttcaatgaaaaagtccctacagtatcaaataattgatactgtagggacgaagttaatcgcggttccaccctacttttttacatctctgtaaaacagcttagtttaagcggctgttagagtgccaaggataaataaactacaaggcttgcactatcccctgatcgctgatttggtttatccataatctctgtcattgccaatattcaattaaacacgctcttataatagaaaaatattttacaaatgtcaatcgttcattgataactttccgatattttgttcccacttaatcatttgtctaatgaaccgttttgccttcaagtttagtccaacctcgttatcataaagagtatccaagacttgttggagacgtcgtttagtagctggattaatccgaatagaattcaatttctgcaagttaattgtggcaaactgttggagataataaacagttttacggtcaaggtgaagacgatgttcatcaagtgaccagtgattctgacaaagcatccctccatattgttcagagaagtctaaagccagatcattgcggccacaaacaacacaccgatcccaaattggtgctacaccaaaagcaactaacagctgtgtttcaataatatttgtaattatttgctcatctaatcctttttcgattaagtctaaggctgcagcaacttgattaaaccagccaccaatacttcgaccgtcattaaaagcactgtcaactaatgccaaaatatacgtaacatatgcatttttgctaatgtcacttgcaatattcttgtattggctagtatcacttgctgtattaataaaacttaagccattttcatcaagcgagccaatgtatgtaccatgggtgaatggcaggatatcagcagtcatccgaaagccacgttttttagcattttttacaaaaaacattgccggcccaatcttatcagtgagcatttttactaataggtcgcgttcacgataatcctgtcggtacataatgatcccagtaaattgtgtggttacgcgtgccatgtaaccatcatccttttaatagtctttattccgataaccatagtcttttagcattgcagacttatcacgccagtcaggaacaacttttacccatagttgaagaaatactttgtcaccaagtaatttttcaatatcttgccgggccattgtcccaatctttttcagcatttttccacctttaccaataataattcccttttggccaggacgttcaacaataatattggccgagatatgaatatgattttcatcctcacgctttatcgatgttacatcaacagctactgaatgcggcacttcttgtctcgtcagcaaaaagaccttttcacggatcatttctgcaatcacaaaacgttcagggtggtcacttacttgatcggctgggtagtattgcggaccattgggaagaatcttaataatatcattgattaagttattcacattatttccctgcaaagccgaaattggtacaatccccttaaatggaagggtatctttatactgatcaacaatttcaggcagatcattgggattgatttgatcgatcttattaacaactaaaaagattggctgattaactttctttaagcgttcaataataaagtcatcaccagggccgcgcttctcagtcgcactaacaacaaataagacagcatccacttcatctaatgctgacattgctgatttttccatgaaatcacctaatttagtagatggtttatgaattcctggcgtatcaataaaagtaatctgtgcttctgggcttgtataaattccttgaatcttattacgcgttgtctgtgcaacattactcataattgctaccttttgcccgacaacataattcaataaagttgattttccaacgtttgggcgcccaataattgccacaaagccagacttataattgggattatccatattaaaacttcctatctaataattgctaatatacggggaataaaaataattagacccaccaaaaccgaaaatatcgctgaaatcagtacgccaccagcagcaacatctttagctttttttacatttaattcataatggtgatcaacaatcaaatctgtaacagcttcggtaaccgtattaagaaattcagatgtaaaaacaacaaagattgctaataaaatccataaccattccattgctgaaatctgcaataaggccgacataataatggccaagcaggcagctaaaagatgataccgcatattacgctcttcacgtaatacttggataattccatcgattgcgtgacacattgcttgaattaagtgatgatttttctcagtttgatgtttatcgcgtgagtccataaccgtctagtatctcccgttgtaatttaaacattttttcttcatctgccggctcttcatgatcatatccatttaagtgaagaaaaccatgaacagctaaaaatcctaactctcgatcaactgaatggcccaaaaactttgcttgttctgctaccttatcgatggaaataaataagtcaccaagattaacagggatttcagcggccatttggggatccataataattggtgtttcatctcccgcttcttctgcggcaaaacttaaaacatcagttgcccggtcaacattacgatactgggcatttaatttttttatctctggattatttacaaacgttaaagacatttctgtattttctgataaggaaagttctttagcagcatactgtaataagtcccttaccatctccaattgttcatttggaagctgtgctgttgtttgatcgaaaatttccaagtccatcatttttcctcttttgtctctttatctttatctttttctgctaatcgctttgatgtttggtcctcataagcagtaataatccgtgctacaaccgggtgacgaacaacatcttctgcactaaatttaacaaacttaattgacttaatattattcaaaattcgttgcgcgtttacaagaccactgcgagtcccatgtggaaggtcaatttgtgaaacatcaccattaataaccatttttgagccaaatcctaaacgggtaaggaacatcttcatctgggcattagtcgtattttgggcttcatctaaaattacaaaagctccatcaagagttcgtccacgcatataagcaaggggtgcaatttcgataattcctcgatcgattaaccgctgtgtatgatcagccccaaaaatatcatttaaggcatcataaattggtcgtaaataaggatctactttttcacgaaggtcaccgggtaagaatcctagactttcaccagcttcaactgctggtcgcgtcaagataatccgttccacttcgccacgctttaaggatgccacggccattgcgactgctaggtaagttttccctgttccggcagggccaatcccaaacgtaatatcattatgcttcattgcgttaacatactgccgctgaccaaaattttttacccgaatggctcttccccggcgatctttaataatcgtttcactgtagaggtcagcaaaatattccagtgttccacgatgcgccatcttcatcgcactaacaatatctgtactgtggatgcggatcccttggtttagcaacgaaataagggcacgaaatacatcgatcgtaagtttaacgtcttcttcttgtccacttactttaagattttcaccgaatggtcggatttcaacatccattccttgttcaatcaggctcacaaacttatcctgtgttcctagtaagccaacttctatttctggactttcaatttgaaaagtttgttcaatcgttttttgttctcccacctatacaatctcctttaatttagcagattttatttaatgataattatatcatagatcacctttaacctcatcactgcaagcttttctaagggatctaagttatttttcaaaattaactttaactacttccccactattaaaagttttcgtttttccgtctgccaggcgaattgttaacgcaccatcattttcgatttttttagcagttccagcaataacctcaccatttactaccaagtccaccttctgtcctaaaatcattgagtcttggcgatattgctcaagatactgtggattatcatagtctaaataattattagcaatcgtctcaataagacggctgactaaaagattacgatctgctggtgctattcctgtcgctttatttttaaggcccagcggaaattcttttgtagttatattcaaaccaattcctaccactaaggatgccgttgttcttaattcaaggtctactactgcctcggtcaaaattccaccgacttttttatggtttaaataaatatcgttgacccatttgtaccgaaagtcttgagcagggaaaaattgtttaagaacttccacaattaaaactgcaaaagtcgttgtcattaacccagcttgtagtggtctgtcggttgggctaggcagaatcatactaaagtacaagccagttgctgccggagagtaaaaggaccgtccctgtcttccatagccagcagtttgatgatcagcgataaataccgttggcgcactaacttggtggtgactcaaaaaagctttcgcgatgctttgagttgaactaacctgattttcaacgtaaagacgattcttaaagtgattatgagtataaaaatcaataatatcagcactcaaccttgaatttccggtaaaacggtatccaaggtttctacgactttcaatattatttccgttttttcgtaaaccgttgatggccttccaaacagattcacgactaatattaaatcgctttgctaaatcatttccagaaatccatgaatctggtgctgaaagtaattgccataaaattttctgtgccgtcgaatgaaccattctaaccatcttcttaacaaaaaaccttaatgtgtcgtaaacggcgagtaattgagacggcaataagcgctttgattgtatcgccaaaaacaaataaaacattggaagccaaggcagaaataagcgtggtatgtaattgattagctaaccagattgcgccgactccttccacaaagattacaccccatagccaaacaattagaaattcagttatcccctgtgtcatcccataatgccaacttaattttagactaaaaccaatcaacaatgggacaaataaccaagcaaaaatatatccgccagttggacctaatattgtcaccattccaccgcgtccaccagaaagcagtggcaatccaagcacaactaaaaacaagaagagccatacagcaaatgttcctaatcttggtccaagtaattctccagcaattattattcccatattttgtaaaacaattggcaccggaataacccccaccggaattcccgggactgctcctaaaataacaataattgcaatcatcatggcaacgacagtcatttcataaattgataaacttatcttttccctaatcatcagcgtaaatcctttctttttgcattaattatattcaatagtaaacctcgattcaatataagggttactattgagtaaaaaaattgaggctaatcactttcgatagcctctttttacgaatattgttacgatatcgtggaaattaattaccttctaaaattttcttagcatctctaatttgttgacaaacttgatcaaaaccagttccaccataagaattccgccgttcaactgctactttaggttgtaagcaggtataaacatcttcttcaattttgggcgaaatctttttatattcgtctaatggaatatcaacaagatttgtccctgtcttaagtcccttcagtactagctcaccgacaatctcatgcgcttccctaaacggaattcctttagtagcgagataatctgctaattcagtggcattagaaaagtcatgatgagttgcatgctccatggcttctttctttacttgaagggtggcaatcatcccggtcatgatcttgatgcttgggagaatcgtctttaccgcgtcgaataatccttccttatcttcttgcatatccttgttataagcaagcggaagtcccttcattgtcgttaataagccgaaaagatcaccataaactcgcccaactttaccacgaatcaattctgccatatcagggttcttcttttggggcataatcgaactaccagtagaatatgaatctgccaattctaaatagccaaattcataactacaccaataaatcagttcttcacataatcgtgacaagtgcatcatcaaaatacttgcgttacttaaaaattcaagggcaaaatcccgatcagaaacggcgtccagtgaattatggtatggttcagcaaaacctaaatactttgcacttaattgtcgatcaattgggaaagtggtcccagctaaagcagccgctcctaggggtgataaatccgtgtgctgctggttaaattcaaaacgttcaacatctcgctgaaacatttggaaataagccatgagatagtgcccatacgaaattggctgagcatgttgcatatgagtgtaccctggcataatcgtttcaacattttttgctgctttatctactaattctgcctgtaagtttttcaattcattaatgataatgggcaaccgcttctttacatataaatgaaggtcagttgcaacttgatcatttctgctccgcccagtatgaagcttaccagcaacggggccaatttcttctgtcagcaatgcctcaatattcatatgaatgtcttcattgtcaatcgaaaatgggaggccttcactagttaatcgctcacgtaacttcttaagtccagcaataatcttatcagcatcatctgctgataaaatttgtgtttctttcagcatttttacatgggctaatgagccttcaatatcttcttgagccatttcttgatcaaaactgattgacgcattaaattggttaactagttggtcaccggcttcttcaaaccgtccaccccacattctcttaataggcatcgcttgtattctcctttactttctttttatttttgttttgtacttgagcatagaccttatctggtaattcccaaagtttaataaagccagtggcagcttcttggtcaaattcatcagcggaagtgtaagttgccaagttcttatcataaagtgaatttggtgatttccgaccttcacagattacatttcccttaaataatttaacccttaccactccattaacaactgcttgtgattcatcaataaaagcaactaaagatttcattaatggtgaataccaaagcccattataaataatttcactcattttttgttcaattaggggtttaaagtgcgctacttcccgttcttgggtcaggtcttccaagtctttatgggctgccaataaaacagttgcagctgggcattcataaatttcccgtgacttaataccaacaagtcggttttcaacgtgatcaatccgaccaatcccatgactaccagctaatttgtccagtttcataattaactggtcaagcggcatttcttcaccatcaattgctgtaggaaccccttcactaaaggcaatttcaattgtggttggggtatcaggggcttcttcaattgaaactgtccgatcatatgcatcagcaggtgccgcagcccatggatcttcaagaattccacattcatttgcccggccccataagttctcatcaatggaataaggactagcctttgtgattggaacaggaatgccattatccttagcgtattgaatttcttcttcccgtgaccagtgccaatcccgaattggatcttcaatcttcatatctggtgctaaagcatgaatacctgcttcaaaccgaacctgatcatttccctttccagtacaaccatgggcaatagcagtcgcaccgtattgattagcaactgcaactagtttttgaacgattaatggacgagaaagtgctgaaactaatgggtacttttgctcatacattgcatgggcttgaagggctggtaatacaaattgttcagcaaagtcccgcttggcatcaatcactactgacttccacgcaccaacttgaagacccttttccttaatcgcttcaaggtcttttccttcacccacatcaatacaacatgcaattacgtcataccccttatttttgagccatgcaattgcaactgaagtatctaaaccaccagaataagctaaaacaattttttcttttgacataatctcgtcctccatctcatttgaaattcgttgtttataaatatacgagtattatgaataaaaatcaatagttttagcatattttttcaaaaaatatctttttatgcataaaatataagttgttcatgcataaaaagagtttagagatagaataattatttaattttgttggttaataatttgtttattttgaactggataggtaattaattctgatgcttcaaggtcttccttatgcatatcaactgcattaatttgactgttttcgtaagtcttgtagtaaaaaatacccttctttaggtttgaaccatcagagtaaatcgtatattcaaaagtatccggtgctacttcatccaatcccttttgttgttcgacagattgaagaatgtggaaatagttggtaatgttctcaacttcagaattaccaactggggcatgcatcttagtgaatgtagccttaacaaaacgactttcagaatccattcctcccgggagaaaatgggtccctaagccccggctataaactggtaggtcgacattaggtgcaaatacgttagccggattagcaggtgcaacactacgatagttactaagatttaataattgacgaggaaactccggattatttgtcaaaacaccaactgggttatcataaacattcaatccttttgcggtggattcaacagtcacagaagcccccgttttatcagcaataatccagtgcagcggtgcagcttggagtttatcagaaaaattgatattagcaatgtttgcatttgaaagtaacttcttcgcttcagcaaccgaggaagcagccgcaagaatataaggaactaattcaaatgatgcaatattatcttttccttcttgaactgggaaataatgagctggaccatcaaaattaaggcctgccattccaacacccttttcatttaccccatcaaaatataatggataatcatcacgaacaatcgacattccaataattgcataatggtgttcaaggtttggcatttcccgaaattctaaagtcttattacgtggagtaatcactacttcttgaccaagattaacttccaaatcaaggttacggccaaagtaataatcacctgctgtataaattactgatgtgcacatataaatgccccttttcttttgaatatgccttaattctagtttaaaaagtaaaaatgtacagtaaaaagggactgtgacataagttaagttactttcataaaaagcaaatacgcagtacaacaatggcctctaacgtccggcaaaaccgatcgttagaggcctattgttgcttgcgggggctcccagaggctagcttcgcatcgaaaaacgaagtcacaagtgacttctgtctcgctccctttcctacgattagtcaagaaaaatatttagaaaagaagagtatactaaaccaacccggttcttcttcaaaaatcgagaattagtggtatattaaaattgtgaggtggttatgccttcacagggactattgagtccgtataccgatagtggtattttttatggtgcttaatcatggataagagacatttcagagttttattcatacaagctaccatggcgaccttgttcagttttggacgaggtcgtttttcttttaaacgatagtaatagtcaacaatatgattagaattagcgtgttgttggcggatcatattacctacagtaaaatataagagcttacgggcaatcgggtttccacgcttattaatatgatcttgacctaaataggttccagattggtaacgacgaatatcaattccaacaaaggcattaagctgattagcattgtcaaagcgactaatgtcgcccaattctcccattaactgagccgcagtttgtttcccaattcccggaaaagagcagtataggatatactctggtaagcgctgggcaatagattccatccgcttgatgacctcttcctttttacgggttaaggcaattaattggcgagcgtagtagcgaacttcatcaacctgaatggtatcaccagaaacagccggatatgatttttgggcgagatcgattaatcgatcggcatacttataagctttcatcttagatattcgtttatctgtagaggccattagaatattctttaatttaactctcgaataaggcctaactagtgctggatgaggaaaaagctccacgatattcaacgctaatttagatgttctatttacaaataattgcttaagttctggaaaaacttgttcaagtgcagtatgaagatgatttagacgatagttccaatcagcattgagctgattataaaaccgactaagctcatgtaactgaagatagtcttttttccaaggaactgttaatcgaaaagcattttcctggacagtgagcgcaatccgatgagcgtctttctgatcggtcttaactcgtcgtagactctcggactttaaatgaagttctagtggattaagacggcaaaagcggagaccattagtctcacagaaatgtccaattactcgcgaataaattccagtcgcttcaaagtagataattggcttctgagcttttttaatcatatctcgtagagcattaaaccccgctttcgtgtgtactaaagaaaactcctttaaacagtgtttccctcgataccagacacagtagcttttcctcattgaaacatccaaggcaaatatatcagacataaaaagacttcctttttataaatagagctagatataaccgctatcctagatttgtacttcatttcctaaatactcgaactcgtagttccacaacctaaaagcaaaatatcaaatcaaagatagcggagatcattttataatacggactcgaagtccctgggagcatgatcgatcttagctctatcttcagaataacaaaaaagtccaggacaataattatttttgtcctgaactaatcttaggttgttttacagctaatattacttactcaattgttcttttacaacctggttaactaattttccatctgcttgaccttgaactttgggcataactgaccccattacttgtccgaagttcttcatactagaagcattaagctcatcaattacttccttaacaatcttagtaacttcatcttttgataactgctttggcatatacttttcaacaattgctaattcatttttagcttggttgatcagatcttctcgtccagctttttcaaattcttcaagcgattctttacgctgtttatattcacgtgctattaccgcaatttcttcattagcgctcaaatcgtggccaagttcaatttgttcattttgaactgctgctttaagcatccggacaacgtttaatgtttccttatcacgattcttcattgctgataccatgtctgacgttaattgttgtagtaagctcattatttatccttctttcatataaaaaagctctcaccaggcaacaggtgagagcacacatttttagtaacgacgaccgcgcttattcttacgcttccgtgccgcttcagatttcaacttgcgttttacacttggcttttcgtaaaattcacgtttacgatattcttgcaatgttccgttacgtgaaactgaacgtttaaagcgtcgaagagcgtcgtctaaagattcattcttacgaacgactgtttttgacatgttgatccctccctccgagcttaaagttacgtatcgaggtagcaggcatactgcttccttttcactacaaaaattattttacccaacatggcctaccctgtcaacattacttttaaataaaaatttaaatttcttatccacctattctttgactactccataaactaagtaaccgcttttaattattatacaaatatatgaatatttattcttttcatagattttctattgcataaataaacatttaagtgtatatttagtaacaatttaatcttactattctcaaaggagttattaactatgaaaggttttaaacatttattactgctaatggtaattgcgtttccgatattatgtacacctattactgcattagctgctaacgagagcagttcaactagctcttcatcaaccaataatccatcgcaagtcgctagcaatgattcagtgcaaaagattaaacaaaaaggaacattggttgtgggaatgagtgctgattatccaccctacgaattcacaaccaaagaaaatggaaaaactaaatatgtcggttttgaagtttcccttgctaaacaatttgctaaagacttaggagtaaaactagttattaaaaacatggactttgactcacttctagttgcgctagaaacaggtaaaattgatgctattatttcgggaatgaacgttacggctgaacgaaaaaagagcgttgacttctcaaatacatattattccggtgatagttactttttaattaataaaggagataaagataagctagttaatgtcaaaagttttaatgggaaaaatgtgggagcacaaaacggtacgctccaatcaaccctaatttcaaaggaaatgcctaaagcaaacggcaaagggcttgctaaactttcttccttagtcattgggcttcaatctcataaatacgatgggattttaatggatgctgcaactgctaaagcctacgctgccaataattcaaatctttatgcctttaattcgaaattgccaaatactgctggcggaattgccatggcctttcctaaaggtgatacctcgttagtcaatgccgccaaccagacaattaaaaaagttaataaagaacaactaattaataaaaaatggattcctgaagcctcacagtatatgaagagctataaaaaacaaaatactgttcttagctattggcgttactttgctaaagggattaaatatacattaatcattacagttgtctctgttatttttggtttcctattaggaactctctttgcactaatgcggctttcaaagaacaaattcttacattcaattgctgtttgctacattgaatttcttcggggtacgccaatgatggttcaaataatgtttgtttactttgggattggcgcaattattcaatcacttccggctctcctcgctgggattattgccgtttcactaaattccggtgcctacgttgctgaaattattcgttctgggatccaatccattccacttggacaaacagaagctgctcgaagcttggggatgagtaaaagcgaaacattcagatatgtgattatgccccaagcacttaaaaatatttggccagcattaggaaatgagcttattactttattaaaagatagttcattagtttctgtgattggtgtttccgaattgatgtatcaaacacaattagttcaatcagcaacttataaaggagttttacctttattcatcacaatgatcatctactttatcctcacatttacactatccaggattttgctttactttgaagggagaatgaaacatgcccactaaaatgattgaaattaaaaatttacagaaaaaattcaaaaataatattgtcttaaaagatatttccgaacatgttgataagggccaagtaatttgtgtgattggcccttcaggagcaggtaaaagtacttttctccgctgcttaaatgcactcgaacaaccaacaagcggacaagttctttttgaaggacagaatctgattggcttaagtgataaaaaactcgaccaattgcgagaaaagatgggaatggtttttcaaagcttcaatctttttcctaatatgacagtccttaaaaatatcacaattgcaccagttaaagttaaaaatatcaatgaaaaagaagcaactaaaactgcaatggaactactagaaaaagttggtttaagcgataaggctcaacaatatccggatcaactatcaggagggcaaaaacaacgggttgcaattgcccgggcccttgcgatgagtccagcagtaatgctctttgacgaaccaacgagtgcccttgatcctgaaatggttgatgaggtactaaaagtaatgcgcgatttagctgaatcgggaatgacaatggtggttgttactcatgagatggggtttgctcgtgaagtagcagaccaaatctggttcatggcagatgggtatattcaggaaactggagatccagaggaattttttgcccaccctactagcccccgggcacaagactttttgaagaagattttgaaataaaataatcctcgtgaacagtacacttcaagtaccttttcacgaggattatttttgttttatttattgctcatctggatcttgatcgagcttgtaatcaattttttcatcaaattcaattttaagatcatcaagttgttgttcactaactttgcctggagctgccgttaatggttcaactgccttcgagttcttagggaatggaataacatcccgaatactatcagcttgagctagtaacataacccatcggtccaaaccaaaggcaagtcctccctcaggtggcattcccattgttaaggccttaagtaagaatccaaagcgagcctctgcacgttcctttgtatatccaagagctttgagaactttttcttgaatctttggatcgtggatacgaattgatcccccaccgatctcgttaccattcaagataatatcgtaactttgagcatgagctttatgaggatcttccccatcttcaagataatgtaagtcttcttcatttagcattgtaaatgggtggtgagcggcaatccactttccaaagccttcatcatattcaaacattggccaattaacaacccataagtagttccattggtcaggcttaatcatatctagctcttcagcgattgtacgacgaaggtagccaagtgaatctgatacaacgtggaaactaccagcaacaaagaggattaagtccccttctttggcatccatttcttcattgatttgggcaacttgatcatttaagaacttagcaactggaccattgtaaccatcagcagttaccttaacccatgcaagtccctttgcaccaaaacgcttaatgtattcttcatacttagaaatatctttccgggaatacttatctgctccaccaggaacgcgaattgcacgaacatagttaccatcagcaacagtattagcaaaaaccttaaatgaactgtcttttacaatatcagaaagatcatgaatcaacatcccaaaacgagtatccggcttatcggaaccgtacttgtccatggcttcttgccattccatccgtgggaatggagtcttaacatctaccccacgatttccttcattacccgcttaattaaaccttctgtaactgtttggatgtcttcaggagttgcaaaactcatttcagtatcgatttgcgtaaattctggttgacggtcaccacgaaggtcttcatcccggaaacaacgtgctaattgatagtacttatcaactccggctgccattaacaattgcttaaataattgtggtgattgtggtaaagcatagaaatgaccggggtaaacacgtgatggaacaatgtagtcacgtgctccttctggtgttgaccgtgttaaatcaggggtttcaacatccataaagccttcattatcatagtaattgtgcacaatcgaagcaaccttactccgcaacttcaaattacgcatcatttctgggcgccgtaaatcaaggtaacggtacttcatccgtaagtcttcagaagcatcaacaccatcagtaatatcaaatggcgttgtttctgattttgctaataccttaaccttatcaacggctacttcaacttttccagtcttcatatctggattaatttctttttctgcccgtaattgaacttttccttgaacctcaagaacatattggttacgaaccgcatttgcgatttcaaatgcttctggattttctttttcgttgaatactagttgaacaattccttcccgatcccataaatcaataaagataagtccacctaggttacgacgcttagctacccaaccctttaagacaacttcttgtccaacttgctgttcatttgtatccccagcataatttgttctcttcattctccgcttacctctttcagtttttaataacagtttaaataaaaagcacccttgaaattacaagggtgcaaatgcacggtaccaccttggtatcactcaaaaataacgtctaaacgacggagcatattgcccagcttcaaaagtgtcaatcgaggccaaaatatttggagctctcacctttctccaatcgctgataatttcaagtacccgagcattctttatcaacagctattaatatctttaatttacatttttaccttactcgatcccctcataaatgtcaatactaaggttaattaggtatctgtcaagttttcataggtagcctttaaatatacagttttagtgggttagtgccttaaaaagttgtcccattggtctacttgtggccgtgttaatcggaattattccttgtactgctccaattgacggctttgtcggtgcttttcttagaaactctccagttcgaatatgcatttcctgtaataggctggtttgagccactcgaggatgaactgttaattgttctaggattgtatttaaactagcttgcagttcaccattcattcgggcttcaattaaaccaatcatggctttagccccctgctcagtccatgacttgccctgtttcttcatccggtaagtaaaagcccggtgagaactttcgactgaaccaattaaatgaatatccttaaatccacgcatttgtggtgagaggatataccgccaatttcgctgtagatactttcttaaacgcattaggtcgtctgcttgtttttccgttaggttttgtgattcataagtatctaaaattattgttagctctgcttgatcatgatgacgaacggctttaattgctcgcatggctaattcgttgtgccggcctaaagtatgttcaattttctgtaaacaatgatagcggtcgagaaagtattcaccatgtgcaccttgaggaactagacttaatagcttagctggttcgtaacctgggccagcgtcactgaccaaaaagatcgtttgaccggcaagcttataatggcggtctaaataatcacttagtcgtgcttcaagccgtccttggtgcccaacactgagaaagtcatgccgattaatgatttgattagctactcgctcataaaccctataatggtgcacaagagtcagctgacctgcttcttttttgcctttaatcataaaagcatcaccctcaatagttaaatttttaggcatatggcgaggagtagcttggtgttcttttgcttgagtttgtttagctacctgatttcctaactcatgcacggcgtgcattaccgaatcggtagtaattccgctgtcaaatacaaggttcaaaatgtcggcagtattgcgcattgtagttgtttgggcaatcttagccatcatcattaagtagtgtggcgataaacgacgacgtggtttaatttttaattgttggtctaagtaaaattcacgtttctttgtcccagcctgataataccgtcgttgaaaagtcaccgggccaaagataaagttaagcgtccgtggctgtttattgattacttgatagttcgctggagcttgggactttaagcttcgatctaagctttccaaaaagttttgcatgattacttgtcctaactccaataccccttttaaaataatctgttcagcttcaaataaactacctgatttcaccaaattctgctcgatttctgttaaaatatccatgaggaaagacctgcctttgcttagtattcgacacactaaaggctactggtcttttctttttttgtaaataagtaaattggtctacaaaaaagatttccacgaccagatgaattattcatccaacctatgaaaatcttacactaacgttaattagtgccttataaatcaactttatttaacaatacttgcctaaaaatggtataaataaagtaatttagtaaaggagggacatcaattggaaagtccaaatacagcatggtttaagcgccttccattaaaaaatctcacttctgttaaaccagtcagtggtggtgatattaatttagcatatcaaaccacaactactgatggaaataggtactttataaaggtccaacctaaccattcacaagattatttcagtcatgaaattaatggtctcaaagctatcggtaaggtcattaataccccaaccccactttaccatggtgaaatcgatgggaatgcctatttaattttaaactggcttgatgaaacttggggtaatcaggccgacctgggattagcagttgccaaaatgcaccaacagcataatgaagaattcggctttatggataatcatcaaaccaaggccctcgtaaaagataattcttggaattcaagctggcttgatttttatattaatcagcgcctagaaccagaagtacaagtggcaagccaacgtggccgatggaataaatggcgacaagaacattaccaacaaatggttaataaatttactgattactaccaacaccatgaagtcatccctagtcttcttcatggtgatttatgggccggtaacttcttatttgctggcgatcataaaccatacttaatcgatccagatgcattatttggggatcgtgaatttgatttagctatgacaactgtttttggcggtttcgataatagtttttatcaggcatatagcagcgtctttccctttgatgatcatttagaggaacgcctttcatggtatcgtttctattacctatgcatgcatttaatcttattcggcgagagctatggtggcgcagtcgatcaaattttaagtcaatactaaactgtgacataagttaagttactttcataaaaagcaaatacgcagtacaacaatggcctctaatgtccggcaaaccgaacattagaggcctattgttgcttgcgggggctcccagaggctagcttcgtttttcgagccccctctttgcttttttagcgttcataaataattgtcgtggggccatcattttccagatcaattttcatcatggctccaaaatgtccggtttcaacaggaataccagtagcagctagtttttgattaaaaagatcatataacggttcagcaatctcaggacgagcagcctgtgaaaatccaggacgatttccatgcttagtgtcagcataaagggtaaattgggagactgataaaattgcaccattaacatcccgtagccccttattcatcttaccgttttcatcctcaaaaacacgaagattagtaatcttatgtactaagtagtctaatttttcttcggtatcatctggagcaaaaccgactaagagaaaatagccaaggccaattttaccaacaacttcatcatcaattgaaactgctgcatgatttactttttgtaaaacgactcgcacaagcatcctcctatcgaataattcttttgacaacgtaaacatctggaatgttttttaaaccatccatgattaattgcaactgtcgtaaattacgcactccgataatcaaactaattgttaccatcttgttatggtcaacttttccgttaactgaatttaagaagcgagtactgttatttactgaacgtaaaacatcatttaacaagccatttcgattgtatccctgaacttccaagtcagcattgtagtttgttttgtcgccattaggatttgcccaatatacactaacaattcgttcgccattcttacgggcagctttaatattcggacaatcatcccggtgaaccgatactccccgtccctttgtaatgtagccagtaatagcatctcctgggattggactacagcaatgacttaaacgaacaagaagattgtcaactccttcaacaattacgccctcgctcgatgccttagcctgtttttgcttttcacgttcatttggcttctcaagagtctggtgatcttctagtacagctttttctgctgcttgttggcggtcgctttcaacttgctgacggatatcagcagtaaaacgatttctaataccaacgggagccaagtcaccaaatcctagggccgcaaacatatcatcactactattgtaatgagtctcttgagcaacttcctcacatttttcatcagtcattaattctgctggcgaatatcctgcttcacggagttcgttttcaagaagttgttttccttcttcaatgttcttttctcgatcgtgtgcacggaagaattggcgaatcttattacgagctcgccgcgttgaaaccaaatcaaaccaatcacgactcggaccagctgatgatgatgaagtcaaaatatcaacaatatcaccatttttgatctcataatcaaggggtacaatccgtccatttactttagctccagttgtatgattaccaacttcagtatgaatttggtaagccatatcaagtggtccagatcccttaggcatttcaattacgtcacctttaggggtgaatgcatagaccttatcagtaaatatatcgctctgaatcccctgcataaattcatctgtgccttgactttcacttcgtaattcaaggatttctttgacgacatttagcttttggctatcctgagtttgttggattccattagtctttccttctttatatgcccagtgagcagcaaccccatattcagcaatttcatgcatcttgtgagttcgaatctgtacttctaatggccgtccttccggtccaataattgttgtatgcaaggattggtacccgttagtcttaggcattgcaatataatccttaaaccgtccaggcattggtttccaattagtatggatcgctccaagagcagcatagcagtcccggattgagtcaacgacaattcgaactgcaagaagatcatagatttggctaaattgcttatgctgagtaaccattttacggtagacagaataaatatgtttaggccggccataaatttcaacattcggtcctaagtccaaatctgcaatcgccttttttatcaacttaattgactcatcaatatagtcaacccgctgatcgcgccgtgaattcattaaatggacaatccggtaatattgttgcggatttaagtaccgtaatgatagatcttctagttcccacttaatagtactgatacccaagcgatccgcaattggagcataaatttcaagggtttcatttgagatgcggcgctgcttatcaggacgcaaatgcttaagagtgcgcatattatgaagacggtccgcaagcttgacaatcattacccgaatatcctttgacattgcaagtaataatttacgatgagtagcagccatttgttctttatttgatttgtaacgaatcttaccaagctttgtatcaccatcaacgatcattgcaatggttgatccaaagagttctttaatatcatctaaggttgcgccagtatcttctacaatatcatgtaaatatcctgcacaaactgtttcgggatccatatgaagattagcaaggatccccgcaacttggataggatgaataatatacggttccccagatttacgtcgttgatcatggtgagctacctcggcaaaatgatatgccttttcaactaaagcaacgtgttcttcattcatataagaactaactattttttgaacatcttcatgtgtcaattccttttcttttgacatcgaacgacctcctttcaattacttttgttgacgcattgcccaggataagtacgcaagcgctaagtaagcaagggcaaaataataagtatatcggggcataaagaaatacgcagttatcaagtaaaggattggaaaaatgaataactcgccccattttcgctggtgcttataaatccaataaccggaccaaatactaaaaataccattaataaggattaagacaatctctaccattaccactcgcgtaacaaatggaagcttatcaacaacgagcgtcaatacaatcccaattaaaatgctagctagccataatggtttatctaaacgttcccatgcttttttcataaaattcattctctttcaacacctatattcagttttaaatcaccgattaaagctgttctttattttaccataagtaagccagctacattatgacaattccattgcatatgagatagccgccatgaaatataaaggcgctgtttcagttcgtagaattcgtggtcctaaacctgctgctaccacgccagcttcattcattttagcaatttcattttccgttaatccaccttctggaccaaaaatggcaaggagcgagtctcccgggttaagggcattaaattgttgcgctaaagcacttgtttcaccctgtttagctgattcttcccaagcaactatccgtttggtagcgggataatcggctaacaattgatcaagatttgcactgtattcaacctgcggaattttatttcgatgggattgttctgctgctgattcagctattttttgcagacgttcgatctttcgtttctgcttatttccctgccaatgactaatggagcgagcagcatcgaagaaaacaattttgtctgcccccaattcagttgccttttgaacaattaattctggtttctctttagtctttggaattccgcaggcaagcgttaccgaaactggcaattcactatcagcatctaacttctgattgatttttaatgtcgccgttggttctgtagtactaagagtcgcaaggtaaacacagtggtcggctaatacaagctcaacacttgttccaacctctgcgcgcattacctttaacaagtggtgggctgcttcagatggcaatgttacttcattagctggagttacattaacaaaatagcgttgcatttatttcacctcgattggcttgtgggtaatcattccgtgccagtccttcatctgctgttcatcgtcaattataaatccttgctcttgcaacttttgacgaatcaacggagccttatcatcgataattccagaaacaaggaatttgccatctggcttaagattttcatatgcttgaggaataagaggtacgatgatttccgcaagcatattagcaacaatcaaatctgcctgggtatggatcccatctaataggctatttacgccaaccttaacatctttagcgaccgggtttagtgcaagattcttttttgctgagttgactgctacttcatcaatatcataagcatcaacttttcctgcccctaagtgcttggcagcaatacttaaaacaccagaacctgtcccgacatcgattacatattcattaccaacaactgttttttcaagggcctccagcattaaacgagtagttggatgagtcccggtaccaaaggccattcctggatcaagaaagattaatttttctttaggatctgctggctcatattcttcccattgcggaacaatcgttaactgatccgttactcttaatgggtgataatatttttgccaaaccgttgcccattgttgattatcgacgatcgctgctgagacatcattttctcctggattcaggccgtaatcccttaattttgctactcgttgatggatagttggcaatagttcaggaacaaatacgttttgggggaaatatccagatactgctgcgccattttttcggtgcggaattgatgatggatcaataaattcaccgtggtccccatactttccctcatgtaagtttgcaaaatcagcagcatcttcaatttgaacgccttgtgctcccatatctgtcaaaatatagctaactgcttcaacagcctcactagaagttattacctttattgctgtccaatccatttaatgacctccttaaataataaaatcgtgaccacaataaaagtaaatggtcacgataaataccaacttaataaagtctaatcattttcattatcaactttactaatatgtggtcgttcttgttcacgtttcttttctttttctaaatgatgacttaagtaatcgattaagtcggactcagtcaagaaaatacggggatgatgttggtgatgcaaccgaacatcaatctcgttaatttttaatcgtccggtccaagtatgggaataacgaacaattacccgattatttagtctgtgtttaccaaagcggaacacatatacgtgttggggtgtcatcattggccgaatgtactcttttttatacattaaatcattgtcgcgcataaactgcttagttcgattcagaatggtaaccacctcctctattattattcctgatcaattttaaattaatctccctagataggtatattttagcacaggtcaccaacgttccaaagtttaatctatgtttaaactttaattttcaaaaaaatgctatactatgttcacgatactttaaggaaaggtgattacaatagtgagtctcttaattgctattcttatctgctggttgctatggaagattgggggtttaacggttaagttcattggtctaatccttcttattctattaatcgggacattaattcatgttttactttggccagcgatccttttagcagttattatcttaggagcaggtttattcactaactaatttatctataaaatcttatagtaatttttctgcggaatgttataatcattactgtgagagaaatctcaaataatgtatacataagatgaaagggagactgtttattatgtctaagaatcatcaaaaagttgttcttgttggtgacggtgctgtcggttcaagttacgccttcgcaatggcacaacaaggaattgctgaagaatttgctatcgttgatattattaaggaacggactgaaggggacgcaatggaccttgaagacgctactgccttcaccgctcctaagaacatctactcagcagattacgacacttgcaaagacgctgatttagttgttattactgctggtgctccacaaaagcctggtgaaactcgtcttcaattagttgataagaacttgaagatcattaagtccgttgtagaaccaatcgttaagtctggttttgacggaatcttcttagttgcagctaacccagttgacatccttacctatgctgttcaaaagctttctggcttccctaagaacaaggttgttggttcaggtacttcacttgattccgcacgtcttcgggttgctcttggtaagaagcttgatgttgaccctcgtgatgttattgctaacattatgggtgaacatggtgattccgaatttgctgcttactcaagtgctactgttggtggcaagccattacttgacatcgctaaggatgaaggtatttcagaagatgaattacttaagattgaagatgatgttcgtaacaaggcatacgaaatcattaaccgcaaaggtgctaccttctatggtgttgccactgctttaatgcggatttcaaaggctattcttcgtgatgaaaattctgttctccctatcggtgccccaatgaacggtgaatacggacttaacgacctttacatcggtactccagctgttgttaatgcttctggtgttgcaaaggttattgaagttccacttaacgaccgtgaaaagaaggctatggccgactctgctaagcaattggaagaagttgctaagaacggtatggcaaagttacaaggtaacaactaagccgtattcataaataaaacgatagattatcgtgctactaaaaaactctcagcgtttagtaaaacgttgggagtttttttgcctatttttgatcattttttaagtcacgtgcaaaatcatcaagaaagtcttctattaatttatccttataacccttttttctaagttcactcgctaaaattgccgaagtaagcccctttcgaattgctaacttatgatcacctgcgagccaaaacattactaattctcgatcttccatttaaaatgctcctttttcctcatatattcagtgtaccactttcacttatcaggatttgaaggagtttatcaattattaaggaacatcaataccaagttcagttcctatttctttcatttcttgataggtcttttcatcaatcgtgacacctttttctttattttctgctaataaacggtactcacgatcaccgggtacccaaatttctttaccaggaatatgttcaagctggcgaattcgatctagcattgatgtggcatctttctttcaatacctctggatcaccaaagaatgctggattaagaaccattacaaattgactaaaatcatgtttaccactaacagtatcggcagagatagagccttgagctaaaatacccgtcaataattcaattacgatagaatttcccatccccttataattagaattttcctcatcatttccgccaagagtgagaactcctccacctttttgttccccttcagtaaaggccgcggtggcaagaatatcttctgcctcttgcgcatcagttactacctgccgatctttatcaactgcccattcgcctggcaacggttcgccttttttagcatgaacttgaatttttccacctgaaacaacacaagtggcaccatcaaacataaatggatgtggagaagcaggaaagccaaacgcaaaagcattagacccaagaaaagcctgagtagcattagttgggactaccaggggacgagtgttagtaagggcaactcctaccaatccagcttctaacgctaatcttgtatagtaaccagcggtgccgaagtgattcgaattgcgaataacagcaattgccacccctgttttcttagccttttcaattattttttgagtcgctaaaaccgttgcgagctgtcccatattttgattagcgtcaacaaggacggatcctggtaactcacgaataattttgaccttattttggggaataatcgttccctctttaatcatccgacgataccatgctaatcgttgaatcccatgagatgagatcccgcgtaaatccgcatcaactagagtgtctgctaataattgactgtcatcttggttaaatcccaattttgtaaaaacttctactagataatgccgttcatcggttgcttgaattctcctttttatccttctctcattttacattaattatattttaataataaagtgagaaatgtcaatattcaaaatatcttaaaggttaggatccatcttaaatgacatctttgaaagctcacagccttcagttaataattcaaagaagagggcctttgtccgttcattataatgggtagctatttcatgattttgcccagttagataatcagttaatgcctgcctttcaagactagctgcttctttatcaacctgcgcaattttacggcgtgcccattcatttagctccttttggtagtcttcatctttttccataaattcttgataatgactttcaacaacctctgctaaggcttcatttaaccagaatgcagactctaagttcattttttccggtacgtttcgatacgattcatcagtatcgtcagcattagcaaaaaatggaacataagggttaaaggctgggacccctaattcaatccaatgaatacttgttttatatttattcagattgcgcacttgtaaaatatgtgattgggccgtccgtgataaagagatagctcggtaagtcttacgttcaggagcatcccccattggatcgtaaggtgtctcattaaaatgcgattttagaacatattggatgtcttcattagcaatcttaaattcagccttacgaataaatggcatttcagaatcttcgggacgttggcctaatgaagcattaggactaaggtaacgttgagcaaaccaggtccgcggtgtgttgtaatgacggtctttttgtgtactggtaccaaaaatatgacggaaatcccaccggtcatggtcagggtttaattggtgttcttcaacaaattcttgaattccatcagcccacatataattatcaggatcgtcaaaatcgatatcttcaattgctacctggttaggagtaacagcataacaatcatcaggaatacgaactgcaacccattggtgaccagttactacttccatataccaaatatcatctgcatctgcaaattgcattccatttccctcagcagagcccaattcagcaattaattttccagtatattcaactccttcacgggcagaatgaatatacggtaatactaaagtacaaagtgagtcttctgccaggccattttttacgtatggatcatatgctaacacccgatcatttgcataaacactctcagtaaaggaagctgccacatttgcttcattaattccatcttcttcattaggtccggctgtttgatcaagggtaggcgtagaagtataacgcattctctcttccggcaaagctacagttactttattgtaaggtgatacgtaggtttcgtggcgtccttttactgccggttttactaaaaatcgcttgggttcaattgcttttacgcgatcttcattacgagcaatataattagcaccgtcgagagaagcctttttaccgaccataattgatgtacaagcatctttattttgcatatttatttcctcctcaaataatagcgattacattatctatgatacgctaatttggtgaggactgcagtattgagcgagtataaaaacccaccatgtttaatcgaatgatgaaaaaattaaatgagaatctgttaaatcgaggagagtccttgtattattatttatggggttaccttcttttctatgtgatttggcgatttcattgtatcagagggcgagcctcttttttagtttaaaaacaaaaaatctgatattggtatagaatgtaatatttctatatcaacaccagatattgtagaaccataacaaaaaaggatcagtacctctatttcttagggaatactgatccttaatttttaccacattttaagctcacgtggtaaaaattactagttttgtatattttttgttttatacaaagccaataaatacctttacatcaacgtttacttctcatccaattgctcatcggtcttcaaaacggccataaaggcggcctgaggaatatcaacttttccgacagccttcatccgtttcttcccacgtttctgcttatctaataatttagcacgccggtctggatcccctgtatgaatacgggcagtaacgtcttttcggtaggctttaatattggtccgggcaataatttttgagcctattgctgcttgaattgggatttcaaagttttgccgtggaataatcttctttaacttagcagtaatttcccgaccacgttctgccgcaaagtcacggtgagcaataaagctcaatgcatccaccttatcgccattgagcaagatgtcaatcttaaccaaattacttgaccggtaaccatcaatttcataatctaaggaagcgtatccccgtgtagaactctttaacttgtcaaagaagtcaaaaataatttctgacagcggaatatgataaataacgtttacccgggtatcacttagatattccatcgtatcaaagtctccccgtttacgttggcaaagctccattactgggccaacataatcattgggtaccatgattgaagcgcggacatatggttccttaatcgctttaatggaagaagcgtctggcatttcagctggattttccacttcttttgttgtcccatccgctaattcaacatggtaagtaacagatggtgcagttgtgattaaatcaagattaaattcacgttcaagtcgttcttgaataacgtccatgtgaagtaatcctaagaaaccacaacggaatccaaatcccaatgcttgcgatgattccggttcaaaggttaatgctgcatcattaagttgaagcttttccaacgcatcacgtaaatcattaaatttagcattatcagttggataaagtccagcatataccattggcgtcatttgccgatatccttctaacggcttatctgtaggattatctgcacttgtaaccgtatcaccgacccgagtatctttaatgtctttaattgccgcggtaatataacctacatccccagccatcaatacatcacgtgccaatggtttaggagagttaattcctacttcagcaacttcatattcggtaccaccgttcattaacttaattcggtcaccttttttaaccgttccttcaacaacccggacactaagaaccacgccccgataatcatcatactttgaatcaaagataagggcttttaacggcgcagttaaatctcctgttggtgctgggacatccttaacgattttttcaaggacttcatcaacgcccattccagtcttagcactaatatcaactgcctcatcagtatctaaaccaatctcgtcttcaatctgtttcttagtaccctcaggatcagcagaaggtaaatcgatcttattgataacaggtaagatctcaaggtcattgtcaagcgctaaaaagacgttagcaagggtctgtgcttctaccccttgcgttgcatcgaccactaagacggcaccttcacaggcagcaagagaccgtgatacttcataagaaaaatcgacgtggcctggtgtatcgattaaatggaaaatgtaatcttcaccgtctttagcatgatatgtcaaggcgacggcatttaatttgattgtaatgccccgttcacgttctagaggcatatcatcaagaatctggtttttcatttcacgtttgctgattgaatcagtcatttctaaaatacgatcagcaagcgttgattttccatggtcaatgtgggcaacaattgagaaattccgaatgtgtttttgccgctctttcatttcttctaggttcatttaaaaagactcactttcaacgaatattctttatctagtataccaaatcctcgtttagaatgggaaaccttctactagatatacaaaaagcaggaaaaatattaagcttttcctgcttcataaaaattatttacttatcctcaaaggcatcacgtaacttatcaagaactgtcttcttcacacccttaacatcttcaccactagcagccgcaaaagctaacattgcttcacgctgacgcttgttaaggctcttaggtgtcttaacatggacagtaacatgttcatctccgttaccattaccgttaaggtgtggaacccctttgccacgcaagcggaaattagtttctgattgggttcccgcaggaatcttaaggttaacatcaccatgaaccgttttaacttttacttcatctcccaaggctgcttgagcaaacgaaatatcacgatcaacgtaaattgttgaaccgtcacgacggaattcacgacttggtgttacccggaagacaatatacaaatctccggctgggccaccattctcaccagcgtctccttggtgttggagccgcatttgttgaccatcatcaacaccggcaggcaccttcacttctagctcatgacgttcgtgaatatgtcctgcaccatggcaagtatcacaacgatcttctggcttaataatctttccagttccattacattctggacaagtggtttgagtttgcatattgcctagtggtgtttgacgaacactcgtaatcacgccggcaccatgacaccgtggacaagttattggcgatttaccaggctttgctccggttccatgacaagtcttacattctgcatcacggttatacttgatagtagttgttttaccaaaaaccgcatccataaaatcaagagtcattgcatattgtaaatcacgtccttgacgcggggctgttgggtcccgacgagtacgaccaccgccaccaaagaattgactaaagatgtcgtcaaagccgccgccaaagttagaataagcttgaccaccaccaaagccgccaaagccttgaccgccagcaccttgtgggccagctgaaccaaattgatcatattgagcacgtttttggctatcacttaatgtctcatatgcttcattaatcttcttaaacttttcttctgcaccaggctcgtggttaacatctgggtggtattttgccgcaagccgacgatatgcacgcttgatgtctttttcggatgcatccttagagacacctaaaatgtcataataatcttgttctgccatataataaatacctcattactttattgcttgtttagttataccacagccagcaaacgaaagtaaaagccaaagtccttttttctggcctttggcttttacactaacattttaagactgtttaccgcaggctatttcttgtcgtctggtgtaacgtccttaaaatcaccatcaacagtattgtcatcattaccgttgttattaccattttgttggttatcaccaggctgaccattagcagcgccaccttgtgcaccttgagcttgttggtaaagctttacgctaaggtcttgaataactttgtttaaagcatccttcttagctttcatttcatcaaggttgccgctttctttagccttctttaattcgtcacgagcactttcagccttcttgatatcatcttcaggaactttacccttaacttccttcaaagtcttatcaacttggaagagttcttggtcaacttcattctttaagtcaacttcttccttcttcttcttgtcggcttcagcatgctcttcagcatccttcttcatccgttcaatttcttcatcacttaagcctgagttagacttgatagtgatattttgcttcttgtgagttccttgatcttcagcagaaacattaacaataccgttcttatcgatatcaaatgtaactttgatttgaggaacaccacgaggagcagcaggaatatcagttagttggaagttacctaaagtcttgttatctgctgccattggacgttcaccttgaagaacgtgaatatcaacagctggttggttatcagcagcagtagagaagatttgactctttgaagtaggaatagttgtgttacggtcaatcaacttagtgaagacaccacccatggtttcaataccaagtgaaagtggagtaacatcaagtaatacgacatccttaacatcaccagtaagaaccccaccttgaatagctgcaccaagagcaacggcttcgtcaggattaattgagtggttaggttccttaccagttaattccttaaccatttcttgaacagcaggaatacgagtagatccaccgtttaagataacttcatcaatgtcatcaaaagtaagatcagcatctttcaaagcattcaatactggttgctttgtccgttcaactaagtcattagttaattggttaaattgtgcccggcttaatgtcttttccaagtgtaatggaccgttttcaccagctgaaataaatggtaagctgatttgtgcctcttgaacacctgacaagtccttcttagccttttcagcagcatccttcaaacgttgaagagccatcttatcttgagaaagatcaacaccatgttcttccttaaagccatcaattaaccaatccatgatcttttggtcaaagtcatccccacctaaatgagtatcaccattagtagaaagaacttggaagacaccgtcacctaattcaaggatggaaacatcgaatgtaccaccaccaaggtcataaacaaggatcttttcatctttgtccttcttgtcaagaccgtatgctagggatgaagcagtaggttcgttaataatccgctttacatcaaggcccgcaattttaccggcatccttagtagcttgacgttgagcatcattgaagtatgcaggaacagtaataactgcttgagtaacagtatcaccaatgtagtcttcagcatatttcttaaggtattgcaaaatcattgctgaaatttcttgtggagtatatttcttaccatcaacttcaacagtgtatcctgcttcacccatgtgactcttgattgatgaaatagtgttaggattagtaatcgcttgacgctttgctacttctccaacttgagtttcaccattcttaaatgaaacaacagatggtgttgtccgacttccttctgggttggtgataatcttaggttcattaccttccataacagcaaccgcagagttagtagtacctaaatcaataccaataatcttattacttgccataatttatttccttctctcacaaatttattgagctacaacaaccattgctgggcgtaatacccggtctttgagttgatatcctgcttgaagaacattaacaacagtttcaggcttctgaccttcttcgaccgaaacagtttgaactgcctggtgaagagtaggatcaaatgtttcaccatcagctttgatttcagtgatgccatgatcatttaatgcctttacaagatgatcatggaccatttgaatgccctttttaagttgcttgccattatcgtctacaacttcaattgctaaagcccgtttaaggttatcaagcactggtaaaattgactttgctaaatcctgaccatcatatttaaggatttgagcccgttctttattaaaacgattagtcatattttgaatttctgcttctgctcgtaaatatttgtcatctttatcagcgagctgcttctttaagtcagcgatctcttcttttaatttaacagtttgatcatccttcttatctgaagcctctttttttatatcttttttaggtgccttttcattttcaggcgcagtttgtttttgttgttcttcttgtttttccttggccaattaactcgcctcctatgaatcataatagtgacggtagaaatctaatagccgttttgctaattcttggcgaaaggcatttacaattccaatcgtccgtgaataaggcatccttgttggaccaagaactgcaataattcctcgtccatattgttcaacattataacttgcagtaatcaagctataatcatcaagaagcttattcttagagatttcttgaccgattttaacattaactccattatctgaggtaagtgttgaatccaagatattcgataagttgtcgttcttatctaacaagccatacagtgattggattgcatggggatcatgagtacttgcaaaatccagtaagttcaatcgaccaccaacgaaaaaccgctcacgtgctgcttgagataagacattatcaaaaatatcaaggaaaccatcgggactatgcatataatgcagaacctgaagtggaatatcatcttttagtcgttttaccacttctgatagcggcaaaccaactaattgatcattaatcattctaattactgtctgcaatgcatctgtgtcaatgtctgccggcaaagtgaatgactgattttcaacctcaccgctatcggtaaccaagatcgcaataaccttatgatttcctagcggcacaactcgaaagccactcaaacgaacactttcttgctcaggctttaatgtaaaagcagtatatgaagttaagtttgataagatatctgctgaatgtgaaataatctcgtcaatcttttgaaaaccggttccaagtgagttttgaattactaccaggtcattatcagtaactgcttgtggatcaagcaaattatcaacataataacggtaacctcgtttagatggaatccggcctgatgaagagtgctcttttaagatcaaatcattgtcctctaaaaccgccatctcattacggacagttgctgaactgaccttaaaaggcaacttttctgctaaatgttttgatccaaccggttgaccagttgatgtgtattgacgtacaatcgcttgcagaatctttttctgtcgttgtgttagcatcgtatatcacttccccttttagcactcattagggtcaagtgctaaacacactgtataatataccaattactcccctaaaagtcaagaaacgtcaaataatttttaaaaggagctttatccatgaaacataaagaacatcgctatattcaacctcagaatactcaagaagcaatgttattaattcagaagttatttaataaataccgcaatgcgtccctaacgaatgaactattagaataccataacaacctaatctatcgtttgcagtcagatattaaagacgaagcaattaaggagaacaatcctaatcaacttaaggcacttgcttccatgaccgaaattatgcgtaactggacaacagtacgcttaaacggccagccttttaacgggaaaatgcggcatttcaaattagtgactgatggcggattcaaatttgaacgaaatattcataaaattaaccagactaccagtcatcggggaagtcggcattaaaaaagaggtttgatgaatcttggtggcgaaattgccacgaaagatcaatctaaacctcttttatttatatttttctaaaatacgacgggcgttttgttcatcttgcttcatctgtgctactaatgcatccgctcccgtgaacttttcttcgccacgaaggtactgataccagcgcacaactacttcttcaccatacaccatttgttgaaaatcaaatagattaatctcaaccgttaattgattagcatcgccaaatgttatgttatggccaacacttgccatgccgtcataccacttcttaccgagcttaactttgacagcatagaccccaatcccaggaattcgctcctcttctggatgctcaacattgattgtaggaaaaccaagtgttcgtccacgagctaagccatgaactactaagccagttgtttgataaggataccctagtgcttggttggctgcttctacattaccagcatcaattaatttccgaatttctcgcgaaccgaccttttcttgacttccatcctcagtaaatttgggcacagttacaacttcaaaccgtcccgctgcatacttaggaagcaacttcattgatgcaatatcttcttttccataagtatgatcaaaacctgctacgaccgtttgagcatgaaagcctaccaaatactcatcaacaaattgctgaggagaaagacttgcaaaagacgaggtaaagcttattaaataaacccgatcgacatcaaggtcatttaataactcaagcttcctatcgaccgttgatagatatttaaagccgcccttatattgacgataaacaattcctggagcatgatcatacgtcaaaactactaatggcaatcctttttcacgggcaatttcacgggcacgtttgattactgcctgatgtccccgatgaacaccatcaaagaaacccattgcaagtacaattggccccgcaggaattagtcttttttccaaaggatggtgaattttaataacttgcaactcctacactcctcaattaactgcaaacattttagttggcttatacattttatttttcggatcaaaatgatatagtgcttttacttgtccatcaaatgataacacaatttccttctcactagtattaagttcacttggagaaagccatcctccattttgaacctttttccattgagcctcttgaatcgttaattgcggatagtccttcaaagcataatctaaaggatacaaatattgctggagagtttgggtcgcaacagcatcgcgaacgtcgtctaaacttagagtctgatcaagagtaaagcctccactcttcaaccgcgttaacaaactcattactcctggataccctagtttacgtgcaaggtcaacaacaagcgtccgaatataagtacccttactacattcaacattaaaacggattcgttgttgtttattttcctcatcatactttgagcttagtaattcaaatttgctaatagtcacttgtcgtttgggccgttcaacagtttcaccagttcttgcatattcataaagtttttttccatttacttttacagccgaatacatcggtgggatttgtattattgtccccgttaatgaattcatggctgataggatttcactagtcggaatttcatttgtaacttctttgtcctcaattttttctccatcaaggtcttgagtagtagtcgcaaaaccaattaaaagctcgccttgatattgttttcctgattgcatcaaataatcaacaactttggtagcatttccaacacaaattggtaaaacacccgctacacctggatcaagtgttcctgaatgaccaatctttttagtttttaaaatttgtcgtagtcgactaacacatgcaaaactagtcatcccacgttctttatataagggtattattccatccatcattattcctccaaggggctgctgtgatataagtcaagttactttcacaaaagacaaatagtgcagtacaacaatggcccccatcgctcggtaaaaaaacgaacgttggaggcctgttgcttgcgaggggctcccagaggcttgcttcgcgtcgaaaaacgaagtcacaagtaacttctgtctcgctcccttttcctgctaattatttttcttttttgtgtaagtcgttaatgagttgatcaattcgactaccgtaagcaactgatgggtctcttacaaatttgatttctggagtcttaaaaatattaagacgtgcgcctaattcactgcgaattaacccagttgccttatctaatccagcctgtgccttctccgcatcagaagcaagatctgacaagatactgtaatagatggttgcttgctggagatcaccagtaacatccacacctgtaattgtaacgttttgtacacgtggatcacgaacacgttttaacaagatttcatcaacatctttttgaatttcttgagctaaacggtctactcgatattgtttacttggcatctttatctctcctcagcttttacttaactggaacttctttcatcttgtaggcttcaataacatccatttctttaatgtcattgtagttttcaattgtcaacccacattcgtaaccttgcttaacttctttgacatcatctttgaagcgcttaagactacctaattcaccttcgtaaataacaacgccatcacgaactaaacgaacctttgcatcacgggtaatcttaccagaagtaaccattccccggcaattgtaccaacttttgatgccttatagatttgacgaacttctacctgaccaattgtttcttccttgtataccggttcaagcattcccttcatcgcatcttcaacttcttcaattgcatcgtaaatgacacggtgaagacggatatcaatactattagagtcagccaatgtcttagctacggcagttgggcgaacattaaaaccaatgataaccgcattagacgcttcagctaaggtaacatcactttgattaatggcaccaacggcttggtgaataatatcaacacgaacaccgtcaactttaatcttttgaaggctttgacttagagcctcaacagatccctgaacatcggctttaatgataatcggtaaggtcttcatttgacccttcttcatagttgcaaagaggttatctaatgtaacatgagaagtcttttgacgttccttatccattgctcgttttgcccgttcttcacctgctgcacgggcagtcttttcatcatcaaagacaacaaaccgatccccggcttctggtacttcatttaacccagtaatctcaacaggagtagatggggtagcttctttaatacgacgaccattttcatttgtcattgtccgcacacgaccaaatgtgttaccaacaacaattgggtccccaacatgaagagtaccttgttgaattaaaacagtggcaactgatccccgaccttgatcaaggcgggcttcaacaactgatccagccgcattttgatccggattagcctttaattccagcatttcagcttggagtagaatcatatcaagtaattcatcaagattcttaccaaatttggcagaaatcttaacaaaaatcgtatctccaccccagtcttcaggaatcaagttatactttgctaattcttcagttacacgatctggatttgcacctggcttatcaatcttgttaactgcaacaataattggtgtttgggcagcttgcgcgtggtgaatagcttcaactgtctgtggcataactccatcatcagctgcaacaacaaggaccgtgatatcagtaatattagctcctcgtgcacgcatttcagtaaaggccgcgtgtcctggcgtatcaaggaacgtaattaattgatcattatagtgaacttggtaagcaccaatttcctgggtgattccccctgcttcatgttcagtaacatgagagtgacgtaacttatcaagcaaggttgtcttaccatggtcaacgtgtcccataacagtaacaacagctggccgcgttacttgatgttcagtattattttgttcatcttcaaacatcttatcaatgtctgaaacgtcaacttgaaccttttccttagcctcaataccgtaatcagttgctaataattcaattgtatccttatcaagtgactgattttggttgatcattacaccaagcataaataactttttaacgatttctgctggtgaacggtgtaagatctttcctaagtcttgggcattcatcccatcagtatattctaatacttctggaagcggcttatcttttcgttgtgttggttgcttatgagctacttcacgtaaccgcttgttcttattgtgtttcttattcttcttatttttcttattaaagcgtttgccattacggccttgatcgttatttaagctgccgccaaatcgaccaccattgttttggtgttgattattatcttttgttccattgtttggtcggctattgtttttcttttgtggacgctcattttgtgccttatcatgatcgtggtgttgattgtgattttgtgcttgatggttattttgcttattgtgaccatcatttttctttactggttggcgttgattattagttgttttttgtccaccctttgcaagttgacgtaattgttgcgcttgatctggggtaacagaagacatgtgacttttaactcccattccttgccgattggccatattaactaagtctttgctaggcatttttaattccttagctaattcataaattcgttctttggccatatgctcacactccttatctcatagttagtagttcctcaaactttcttgcaaaacctgattgcattacacaaaaaactgttcgtgcttgccctgttgcccggctaagttgttctctagtgaaatctgttgaaaaaggaatgccataaaatttacatttatcagtaatcttttttgcactagcttttccagcatctgaagctaggaatacaaactttgcctttttagtttgaatattttttaagacaatctcttccccactctgaagttgccgggcacgccgagcgattccaaggaggtttaagacctgttctttatttttgatcattaccaaataactcttgtcgtgcctgtaggtggtctgcatacttgattaattcatcataaaatgattcatcaagttgaacatgaaaagctttttcaaaagttttttctttcttggcgcgctttgcaatatccacatctactgcaacatatgctccacgaccaggctttttaccagttgggtctaaggagacttcattttccttattcttaactacccgaatcaattgccttttaggcatcatttcaccggtaacaatgtctttacgcatcggtatttttctctttttcattattttcaccccgctgcttaatttctagttattcttcgttattgtcaacattttcttctaaatcagctacttcttcagattcttggtcattttcagccatttcagattcagacttgatatcaatcttgtacttagtcaaccgagcagcaagacgagcattttgtcctcgcttaccgatggctaaggataattggctatctgggacaacgacagtgcatgaacgttctgtttgtccttcagtcgtttcttcaccttcgctatcctcagtttcgcttgctgccttctcttcgttaaagattacatccagtacttctgctgggttcaatgcattagcgataaacttagcgggctccttaacatactccacaatatccatattctcgccatcaagttcattaacgattgcttgtacacgagaacctcgtggaccaacgcaagttccaactggatcaacattaggatcatttgagtatactgcaaccttagcacgatcacctgcttcacgagcaatattttcgattaagacagtcccatccttgatttcaggcacttctcgttcaaataatcgctttaaaagttctggagcagtccggctaacaaaaatttgtggtccccgacgatcgtcatttactttcgttacgtatacttgaatccgatcatggacgtggtagtgctcattaggcatcttatctctaaagcccatggcaccttctacaccatctcctaaatcaacatatgtgaaacgcttatcttctcgtgaaacttcaccagtgataatctcattttcataagtcttatacttgtcgtaaatgattttccgttcttcttcacggagacgctgcattactacttgtttagcagtttgggcagcaatccgaccaaaatcacgaggggtaacttcttcgcgaatttcatcaccaatatcataaccttggccatgaggaagcttccgtgcatcagctaaactcataaattcgttgctgtctgcttcgactgcttcttcatcatcagtaattgtttttacagcgtagactttaatattaccagtcaatgaattgaattctacttcaacattcttatcaccgtaattttgcttgtatgctgattcaagtgcttgttctaacgcttcaataacaatctctttcttgatccccttttctttttcaagataatcaagggcgccaatcatctcagtgttaatttttggcttactcacctttcgacactcctttaatactagaatttaatcgctaatcgggcctgggcaattttctgacgatcaatcgtaatttgccgatgacgagtcttgtctaaataatccaacgtaatttctttattagacaattgcgttaacgtaccctcataaaccttttgaccattaatctgttggtaaagagaaatgtgaatgtaatggtcaattgctcgttgataatcttcctctttcttcagtgggcgttcagcacctggtgaggaaacttctaaaaagtaagcctgtggaattggatcaggttcaacattatctaatgcttcacttaattcatcactgacaagtgcgcaatcttctagcgtaatcccaccgtctttatcaatataaacgcggaggtaccagcttttaccttcttttacaaactctaaatcatataagtaaaaatcatggtcctgtaaaatcggcgttacaagatctgttacagtttctacaacactgctcaaacgtgtcacctccattatttgcaataaaaagagcgagcatctctgctcactcccacgagttatttaccataatctattgtagcatgtaacacagccactggcaagcaatgaagcatgttttcattactattccttaaaacaagctaagttgattttcgtcaggcagcttatctaatacatgattatctgtcaaaaagtcaataagtgtctgcgaaacctttccacgctctgccaaatcttctttagaaaggaatggacgttcttcacgtgcggcaacaatttgcttagcaacgtttagccctaatccaggaactgctcggaatggtgcaattaatgaatcaccatcaatcaaccaatcggaggcatctgatttttcaatatcaaccatcttaaacttaaagccccgttccagcatctcattagctagttcaagaattgttaagagattcttctcttttgcactggcatcatttcccttatcattgatttctttcatccgttgcttaaccgcatctttaccatgagacatcgctactacatcaaagtcatctgctcgcacagagaagaatgcacaataataaactaacgggaaataaaccttaaagtaagcaattcgtagagccatcaagacataagcagccgcgtgcgcccgcgggaacatatacttaatcttcaaacatgagtccatataccattgtggaacattagcttcatgcatcttttcttgccactcgtctggaatcccgcgccccttccgtacgtgttccataatttggaaagaaatttctgagtccattccatagtggattaagtcggtcatgatgttatcacgacaaccaataacattagcgatagtggcaattccctgtttgattagttcctgggcattatctagccacacaccagtcccatgtgaaagaccagaaatttgtaataattgcgagtaatttttcggatgagtatcctccagcatcccccggacaaatcgcgtcccgaattccggcaatcctagtgtaccagttttactttgaatttgttcttcagttacccctaataccttaggactagagaataaggccatcacccctggatcatccattggaatcgattgaggatcaattcctgataaatcttgcaaggcacgaatcatcgttggatcatcatgtcccaaaatatccattttaagaatattatcgtgaatcgagtggaaatcaaagtgagttgtttcccaggcagctgtttgatcatcagcaggatactgtacaggtgtaaagtcataaatatccatatcatcaggaacaataataattcccgctgggtgctgaccagtagttcgcttaacaccagtagctccttttgctaagcgatcctcctctgcctttctaaattccttttctgtatctcgttcgtaagccttcacatatccatatgccgtcttatcagcaaccgtaccaattgtcccggcacggaatacatttttttcaccgaataagactttcatatagttatgggcaattggctggtagtcaccagagaagtttaaatcaatatctggtaccttattacccttaaacccaaggaaagtttggaatggaatatcatgaccgtcttttaccattagagtgccacactttggacattttttatctggcaaatcgaaacctgaactatattccccttgcgtatagaagtgggtaaattgacaatttggacaacggtaatgcggtggcaacgggttaacttctgtaattcccgaaagcgttgcaaccacacttgaaccaacagatccccgcgaacctactaagtatccgtctttattagacttagctactagtcgttgggcaattaaatagtgaacagagaatccgttcttaacaatactgttcaactctaattcaatccggtcctgaactagttgtggcaaaggatcaccataccattttcgcgcagtattccatgtccgatcttggatttcctgttcggcccccttcatatgcggtggataaagtttatcttttactggccgaatattgtcatcaatctcagctgcaatcttattactattctctacaactaattcgtgggctttttcttcaccgagaaaagcaaattcatttaacatttcatcagtggtcctaaagtgcacttctggacgctcagttcgatttaacgggtttgcgccaccttgcgaattaatcaggatcttacggtaaattgcatcatgtggatcaaggtaatggacatctccagtggcaaccactgttttttccaactcatcccctagtttgaccatatttttgaggatatcttcgaggtggtcttcatctgcaatcacatgttgttcaagtaacggtgcatagtttggcttgggctgaacttcaataaaatcatagtagcgcgccttttctagtgcttgatcgtaacctttctccatcatcgcggtaaatacttctcccgatgaacaagcagttcccaaaagcagtccttcacgatatttcgtcagcactgttcgcgggattcgcggtactcggtaaaaatattcaacgtttgatagcgatactaacttaaataagtttttcaaaccagcctgggtctgcgcaaaaatcgttacatgaaaaggccgcgcatgacggtaagcattattttcttccatgtgcttatttaaatcatccacatacttcacatcataacgggcttcagcatctttcaagaacttataaagcaagtgtcctgtagcttccgaatcatagttagcacggtggtgatgttccaatgctaccttaaactttttactaagcgtgtttaatcggtatcctcgcatatcaggatataagaatcgcgccagtggtaatgtatcgattactggttccgcgatttttcccatttgatgacgttcatagccagtattcataaaacccatatcaaatgcaacgttatgaccagcaatgatacagcccttacaaaagtccttaaacatctgaaaaacttcttcttcagtttttgaaccctgaaccatttcagtggtgatactagttaaattagttgtttgttctgataacgggaaaccaggatcgatgaattcatcaaaacgttctaagacatttccatcttgcattttaactgcagacaattcaattaccttatcgtaaattgccgataaccctgtcgtttccacgtcaaaaatgacataggtctgatgagcgagttcttcatgattctcgttgtataccaatggaattccatcatcaacaacattagcttccattccatatagcattttaatgcccgttttttgggccacgctaaatgcttctggaaaagcctggacattcccatgatcggttaccgcaattgctggatgtccccacttatgagcacgagttgcaagctcagtaatcgaattagtggcatccatctgactcattgttgtatgcgtatgaagttcaactcgtttatcatcttgaggagctttatcttgacgcgccgtatgagttacttcattaacatcataagccgtgattaccaagtctcgcatccaagtatcttcttgtacaggcccgcgaactttcaaccacattcctgctttgatattggcaaattgtgcttcttcatcactgttgcgtgagaatttcttgacagcaaaagaagaagtgtagtcagtaatttcaaaggttaataattgacgacctgagcgtagttcgcgaatttctgcattaaatacatatccttcaacaaccacggaccgctcttcaccctcaatgtctttcatttgaataacattctgcttactatcaatcatccggccaagttgaactgggccatcagcaggagcaactggtgcactcttctttgctgtcttctttgcagcctcatttttcttgatccgggcagccgccttggcagcaagcgcagcatcggctttctcgtgtttagcctttaattcttcaatttttgcttgcgaggctgactggtcaacaaatgggtgaatcctaaatttaggaaagcccagctcttggtatgatttttcaatcttatctaatgctttctgtgctagtaagtctttaattacctcattttcaacaactagcgttacacgaccctccttaacctcgggagccgtttgtaagcaagcttgttggagcattggtgtatcactaattgccttattaatgatgaactgccaataattagctatctgtgattcatcaagttttgtcatgggagtactaatcttcaaactaactttagcaatatctttgaaccctagctgtaagctctggttgaactgcgtaaataggtcatacggtaaagctttattaaagattaagtgaaattcccagtgccgagactttttatgaacaacaactgattgaactgcggcatttctgaatgcagaattgtctttttccggaaagtgaatttgttctaatagttttccaaataattcttggcgacttaatcccacgttctaatcctcctacttaaaaatgtggtgcgagtaacgttatttatcttaacatcgcagccacattagtttaaattatttgtttttttcttcgttcaattgctttagtaaaattcccaccgtatttactagctcttcctgtttaacttcaacagtttcaccagttttacggatcttaatttcaacaataccatcttgagctttcttaccaacagtaacccgaattggaataccaatcaagtctgaatcagcaaatttaacccctgctcgttcttttcggtcatctactaatacctcataaccagcttcagttaattgttgatcgatcttatcagccattgccatttgatcttctttcttcgcattaactggaattacatgaacatcaaatggagcaatactattaggccagacaagaccattttcatcagcattttgttctgcaacagctgacaatagacgggttacaccaataccgtaacttcccatgattacgtctgtcaaacgaccattgctatcaagaacttgggcaccaagtttgcttgagtaatgagtacctaacttaaagatatgaccaatttcaattccgggagtaaatttaagtggtttaccatcaggagcaatctcgccttctttaacattccggaagtcaccaaattgatcaacgcggaagtcacggtcaatattagcattaatataatggtaaccatcttcattagcaccacatgccatgttaactaaaaccttaacataattatcagcaagaatttttacttcttcgcctactcctacaggtcctaatgatccaggatgagcattaaggtacttttcggcatcttcttctgtagctaattcaagttcttcacaatcaagagcattcgttacctttgcttcattaacttcatcgtcgccacgcattaatactaagaccggttggtattcatcttcactcattttagcaatgtaaagcattgatttgataacttgattaggatcaagatctaaactttctgcagcttcatctaccgtatgagcacccggagtagcttttttctcaattggtgcaggagcagctgttcgttgtacaccagtaaatttactttcagctttctcaatattggcagcgtaatctccatcagtataagcgattatgtcttcccctacttcagctggtgcagagaattcttgtgagttcttaccacccattgttcccgaatcagcgagaataactttatagtttaagccaatccgatcaaaaatgttccggtaagcctttgcttgattattgtaggcttcgtctaatccttcttgatctgctgagaaggaataaccatcaagcatttcaaattcttttccacgaagaattccataacgaggacgatcttcatcacgaaacttatcttgtaattgataaactactaatggcagcttcttgtacgacttaatactatcacgcaatacttcagtaaaggtttcttcatgagttgggcccaaaataaagtcacggtcacgacgatctttaagtttaaaaagattatcaccatagctttcgtaacgaccagattccttccacaaatcagctggaagaagtcccggcataagcatttcaaccgctccggccttatccatttcatcacgaataatattttctacttttcgaataacccggtaagctaatggtaaatatgaccatacccctgcagatacttggtaaatgtagccggcacgaatcatcatcttatgacttaaggcttctgcatcacttggggcctctttttttgttggaattaatacctttgactgtttcattaaaactatactcctttgtttttaattaccgaataaaatatctttgaatatcgttccatgttactagaaccataagtgttagtaagattagaaaaccaatcattgtgataattccctcagctttttcaggaattggtcgccgaatgatcgcttcaacaatattcaataataatttcccaccatctaatgctggaattggtaataagttaacaattcctaaattaattgataagagggctaagaaatttaaaactccattgattcccaatgaggtggcttgtgatgtcccagcataaattgctaccggtccaccaaggtcatttaagctaaatccatgggtaaccatatgaccaagaacactaaagattaatgttcccgcttggataaattgttgccaaccaaactttaatcgagcagctaaacttctctcttgcttttcaacaattccaatttggccaactttctgatgccctcgctcaactgcttttggtgttagcttagtatgatatgtcttattaccacgctcatacgttactgatactgtcttgttaggcttatttgaaatattagttgaaaggtcagtccaattatttattttttggttgttaaccttaacaatccgatcatttgcttttaagcccgctttggcagctacggaaccggcattcacttgccctaactgattgctattagttggtacgcccgttaaggtaaaaccaagaatgataaatactactaaggacaaaataaaattattcattggaccagcaaaattagtcatcatccgtgcaggcagacttgctgaacgaaattgcacatcacgtggagcaatctgtacctcggttccgtctcgttcaataatcattgcatcatggtcaacactatataccttcagctgatcttcgtccccattgacatatccttttatccataagccatcttctaaatcacaagcaactaattgaaggggatcccctgaaataaggttgttttatcactagcattaatactaataactttatcttgatcatttagttgaatcgttagaggggtacctggctttaactcatcttggtcctcatcatcagcaccagctaaacgaacataaccaccgaggggcaaaattcgaatagtataggtagtaccattttttcgtttccaccaaatttttggacccattcctattgaaaattcacgaaccagaattcctgctcgtttagcaaaataataatgaccatattcatgaacaaggacaaggattccaaaaacaataataaatgtaataattgttattatcaaaaaatctcttccttacgtttgattaaatgatccctaataaatgaagcattggcataacaattagcatactatcaaaccgatctaaaattccgccatggcctggaagaatttttcccgaatcctttacaccatagtagcgttttaatgatgattcgattaagtcaccaaattgaccgaagattgaaagaatcaaagtaacgaatatcattgttacccaacctgcaccaacagggataaagtagcaataaatagccaaaataataacagcagctaatgtaccaccaattgaaccttcccaagttttattaggactaatcttaggagcgagtttatttttaccaatttttcggccaattaaatatgctccactatctgtaatccaaacgattaacattccatataatagcgtttgaaaattgattgcacgagcagcaataaaatagcgaaatcccattccaatatagagcattgctaatgttaaaaccccagcatcatcgaaagtaaagcgttgttttcgaataaccgtatgtaatagaagtaaaacaactaaaatatagaatccgaaccatcgagttgcaacactaggcaagaagtcaagccaactatccggcagtattaataatgcaacccccagataactgatcaaagcttcaaacgaaattacaaacatttttttcattaccaatacttctgacattgcaaccattcctaaggcaacggctgcaattgttaatggccaatgaccatatataataagcggtataaagattgcaagtgcaattaccgcggtcgttattcttgttttcaaaacaaaatccccttattatttattgattttttagtccaccgaaccgccgatgacgtccttgataggcaattattgctgaccgtaatgaatcttcatcaaagtctggccagtgttctggaacaaactccaattcactataagcaatttgccacagcataaagttactaatccgctcttcgccacttgttctgattagcaggtcaggatctgcaaattgacccagttgtgctgacatcaagtacttaccaaacgaagcttcatcaatatccgcaagtgccaagttcccattttgaacgtcttctgcaatctctttagcagcttgagtgatctcatctcgactcccataattcaaagcaaaattgagaatcatccccgtacaatgggctgtatcagccattgcatctttaacagctttttgcgtagcttcaggcagttgcgtaatatctcccatcactgtcaccttaacattatgtttgacaagatctggaacaaatgttgagaagaagcggacaggcaactgcattaaataacttacctctgaagaaggacgtttccagttttcggttgaaaaagcatataatgataagacttttacccctaattcactggcagcaattgtaatcttttttactgtttgcattccttgcttatgaccagcaacccgtggaaggtgtcgtttctgcgcccacctaccattaccgtccataataattgcaatatggttaggaatacgttccatatcaagttgctgatttatttcatcatgtttacttttggaaaacactaattgttcctccattttttatcatgtacttaagattaattacagacacttcttaaaaattcacgtctgccaattaattatagcctttattataccagaggcaaatttcgatttgtcaatccacagtaaattgttacatagttttatcataacaattcaattttagccaaaataaaaaggttgtggacttacgcaaagttcacaacctttttatttctgaaaactagccttccattaattccttttcttttgtattcgcaatatcttcaaggttcttaattccagcatctgtttcgttttgaactttcttttcaagatcatggaattcatcatcattaaagtcgccattcttgttacccttctttaagtcatccatcgcttcacgacgaacatttcgaactgcaacttttgccttttctaattcagctttaacgtcctttactaattctttccgccgatcttcagttaattgtgggatgattaagcgaattgaacttccgtcgttttgaggagttaatcctaaattagatgcatagattgctttttcaatttcttcaagcacgctttcgtcataaggggtgattaataattgccgtgcttctggaattgtgattgatgcaacttgatttaatggagttggtgctccgtaatattcaactttaacagaatttaataaacttgcattggcttgacccgcacgaatatcagcaagtgtccgctgaagtgcatcacctgattttgccattttttgtttggcatcatttaaaatttcttttcctgtagccatattattagtctccttcaattgttgtaccaacttcttgaccagttactactttcataatattgcctgatgtgttcaagttgaagactaccaatggaatatgattgtccatcgatagtgaactagcagtagtatccattacatgtaaattcttttcaatgatatccatatgggttaaatgatcaaacttagtagcatccttaactttatttggatcagctgagtaaacgccgtcaaccccatttttacccattaaaatggcatcagcgttaatttctgctgctcgtaatgcagcagtagtatcagttgagaagtaaggacttcctgttccaccagcaaaaataacgattcgatctttctctaaatgacgaatagctttccgccgaatatatggttcagcaatttggcgcatttcaattgaagtttgtacccgggtaggaacaccaattgattcaagcgcatcttgaagtgataaggcattcataatagttgctaacattccaatgtaatcagcttgcgcacgttccatccctaattcagcaccagtaacaccacgccacatgttaccaccaccaacaacgatggcaatttgaacgcccaaattatgaacttcttttaattctttagctacatcctttaaaacgggtgggttaatcccaaaacccttgtcgccagctaatgcttctccactgagctttaaaattactcgcttatatttaatatctgccatatgatatcctccttgaattggtaagttaatctttaaaaaaggacgcactacattgagtacgtcctccttttgaccgaacgcttagttcatttggtccttaacttcttgagcaaagtcatcttgctttttttcgattccttcaccgacttcgtaacgaatgaaggacttcaacttaccattcttgcttgaaacgtattgttcaacagtttggtcagaatccttaacaaagtcttgatctgctaaacaaatttgtgaaaggaacttgtttaaacgaccttcaacaatcttgtcaacgatcttttcaggctttccttcgtttaaagtttcttccttgaagatagcacgttcatggtcaagacgttcttgagaaacatcatcacgagtcatgaattcagggttgatagctgcaacgtgcattgcaacgtctttagcagtggcatcgtcagcaccttctaagacaaccaatgcagcaatttgaccaccttggtgtaagtatgcaccaaagctatcgccgtcatccttttctacaacagtaaaccgacgaaggctaaccttttcaccagttttttgtgtagtactgataatatcatcatttaatgtgccattttcagtcttgatttctaatgcttcttcaacattagcaggcttgttttcactaattaacttagtaaccttcttcaataagtccttaaatggttcactagcagcaacgaaatcagtttctgaattcaattcaacgattgcagctgtattgccattaacagcaatatcagctaagccttcagctgcaacacgatcactcttcttggctgccttagcaatacccttttcacgaaggtagtccattgctttgtccatgtcaccattactagcaactaatgccttcttagcatccatgataccggcaccggattttttacgtaattgcataacttgagcagctttaatttcagccatgacgaaatctctccttttataatcttttttgaaaaaagggctgtttagtacttaggccagaatggtccgtacaaaacagcccaagaatttaatatttttagtcttctttaccttcaacgctgttcttcaagttctttaatgaatcttcgctaacagtttcgttagcagcgttatcatcagcagtttcttgttgagcatcgtcttgaccttgcttaccttcaacaaaagcatcagccatctttgaagtgattaagcgaacggcacggatagcatcatcgtttgatgggataacgtaatcaatgtcgtctgggtcagtgttagtatcaaccatagctacgattggaatgtgtaacttttgagcttccttaacagcgatttgttccttgtgaggatcaacaatgaacataacatctgggatccgtggcatatcttcaataccaccaaggaaacgttcaagcttttcacgttgcttagttaagacagcaacttccttcttaggaagaacatcaaatgtaccgtcttcgctcatcttcttaagttccttcaaacgagcaatccgtgattggatagtcttccagttggtcaaagtaccacctaaccaacggtggttaacgtagtattgacctgcacgaatagcttcttcttcaatagcatcttgagcttgcttctttgtaccaacaaataaagcaacaccatcgttagcagcaacatctttcatgtagttgtaagcagtatcaattaacttaacagtcttttgtaagtcaatgatgtaaataccgttacgttcagtaaagatgtattcttccatctttgggttccaacgacgagtttggtgaccgaagtggacaccggcttcaagcaattgcttcatagatacaacagacataaataatacctccaaattgtttctcctccccagtcttcttctggcaatgggactatttaagcaccctcaccaccatcattctgggtgtgaaattggcgtgtaacaccgaaatatagtatacaaaaaaccttgcaaactgacaaggtttttcacttaacttattttaaaatttaactagtttatctgaggtgccagttttaatcaaatctagattggcggacaaactcatcttaaccatatttttaattgcttgatcagtatagaaagcaatatgtggcgtgattaaaacatttggccgatcaactaaatccttaaattcgttataatcaacttcttggaaatcaatttgctggttaaaaatcttggtttcaccagtcattacgtctaaagcagctcctccgactttaccgctattcaacgcttcaatcaatgccttttcatcgactaatggtccacgtgcagtgttaaccagtaagaccccgtcctgcatcattgcaaatgttttttcattaagcattttatctgtcgctggaacatgaggtaaataaagcgaaataattgttgcccgtttatataattcatcaaggctaacgtattcaacaattccttctagttccttattttggtgacggctatatgcaatcacttttgcaccaaaaccagcaaagattttagctgctgtggatccaatgtttcctgttccaactatccgacaacctgcttattcatttccttagcaatatgcggtgcccagttataatctccttttgctaattttaaataaaattcttttgttcgacgtaaaaggttgagtgcttgagtaactgaaaattcagcaattgcagctggggaataaactggtacgttagtaatttggaaaccaagttctcgtactaattcatgattaagattatcaaccccaacattccgcaatgacatctttgtaataccattaaacgctaattgacgtaaggcctcgtctgaataaggcttttgctggaatactactactccatcgcttcctttagacaagttgactgtgctttcgtctaaaagtttagttgttgagtctacagttacttcaggatgttcctcttgccattcctcaatgtaagggacttcatcctgataaacaccatacatataaatcttcatcttaattcctccgtagtttcaataaattaacaccatggtctagtaaaaatttttctttttggcggcgggtttgatgtttaaaataatattccgcacttaaggcatcatgctttgattcaaattcctctgaataaataagctttagtggatgacgctttttcacacgagtatattttgccccttgataagtttgatgagtatgaaagcgccgtttaacattgttggtaaagccacaataaaagctattatctgcacaatacaatacataaatatagtatttctcacttgccatataataactcctgaaccgctggagtatactggttatctgctccatgaacaatcaatggtggtactacttttactcctccaggccggccatccttaatcacttcaagcaacaaaatattcgcatcacgatcaggtttaggatgaataaattgaattcttttaggtgctaatctattttcctgacacacttgtaaaatctcacctaaacgatctggacgatgcacaagatacccatgaccattcatttttaataagccattcatctttttaacaactgtcactaaatcagtcgctatttcgtgacgagcaatcgctaaagctttatttggattcttctggctttgggctgtaactgggaaataaggaggattacaaaggacaatatcaatcgagtccttagaaatataatcattaacgtttgcgatatcatcattaatgacggtataacgatcttgtaaatcatttagcaaaattgtccgttcagccatatcagcaatctgtggttgtaattcaacttcggtaaatgttccgccaagcttatcgtggagaaaaatgccgattgccccatttccagcgcacaagtcaacaatttttaatttctgtcgatgattgggacgcacaaagtttgctaataagacagcatctaacgaaaaagcaaaataatggggattttggattatccgtacatcctgactatataactgatcaattctttcatccttttttaaaatatttctgttttccattatgtcctccattatttttgtacttgcaagatccactttttttcgtcatactgaggaacgaaaacttaattttgttatagattggaagattgacatgttgtacactttcctcgttaaaatcgttaatccatttttaaatttgattaacggacgacctaaaatatacaatcgggaaaacatccctgaaggcaattatattattattgcacctcatcgtacttggatggatcctgtcttactagcgcttgccgtatggcccaaaaaatttagcttcatggctaaaaaagaactttttaagaatccaattgctagcaaattcttaaaagcactaaatgcctatccggttgatcggaaaaatccaggtccgtctgctattaaaaagccggttacaattttaaagaagactgacttatcgaccattattttccctagcggatcacgctactcatctaaattaaaaggcggggccaccgtgatcgctaaaatggcaaacgtccccttagttcctgctgtttaccagggacccctaaaatttggccagctatttacccgtaagccgcgccaaattgcatttgggaagcctatttatattgaccgaaagcaacggctcactcccgaagtacaggctgacttagaaaagcaaatgcaagactcctttgaccaattagatagacaaattgatcccaattataaatatattgttcctccaaagccgaagaatgatgaattttaatttccaatataaaaggatgtgataaaaatcacatccttttatattatttacgatttgactttttagcttgtgctttcatcgcttgcatcatttgatgtaatttacgacttgatggtttttgtcccatttgaagcatcatcgtccgcagcatctcttccgaaatcggtggattattgcggaggtagttttccatgtatttacgtgcaccaaagaagccgataaccaaaccgactaataatgcaagaatcattagcatgatcgtcatacccacaattacttcctcctttgctcgttacctatccatcttacacgaaagagcaatttttgaaaagagcaaatcgctgttaatcgtcacgaagtccttttttacgttgaatttcacgaaccttttcaggagtaacctctttaccttctttatcaaaaatccgcatcatttcaatattactacgcattgcttctctaaagttctttaggtattccttacgtaaacgatctcgttctttagtttcttcctcagttaaaccttcttctttattcttatgagcaagttcattaattcgcttcaataaagcatcttgttctttcgattcagccattataatcatctccttaataaagtcgattttacttattttataaaattaatgcaaatcacgaacgtacgtttgaaatatgcatctatctatgataagcttaacacaattaatgataatgaggtgtcaatatggcaaaggtagcaaaaaataaacaaatggccgtcctaaattatattcataaacaagttgaagatcatggctatccaccgactgttcgtgaaatttgtagtgctgttggcctgtcttcaacttcaacagtccatggacacatctctcgcttaattgaacaaggattcttacaaaaagacccttctaaacctcgagcacttgagatcacacccaagggacttgatattttaggtgtaaaaccgattcaaaaagaaattccaatgcttggtgttgttacggctgggcaaccaattttagcagttgaaaatgctactgagtttttcccgatacctccttctattcaagataataatgatttgtttatgcttaccattcgtggaactagtatgattaaagcagggatttttaatggcgaccaagtaattgtgcgtaaacaatccaccgctaaaaatggtgatatcgttattgcaatgaatgatgataatgaagctacttgtaaacgattctataaagaaaaaacacgttttcgtttacagccagaaaatgatacgatggagccaatcttcttagacaatgtaaaaatccttggtaaagtagtgggactatttcgtgatcatattttctaaataaaaaaggagtccattttggggctcctttttatttaggttatttggcttcataaatccgttgatgatccttttgccctttaagaacgaaaggtaatggatcattagtaacatcaaactcgatatcctggtcattcattcctaattgactactgaatagtttttcgtattctgctaccgaaacctggtgacgatgttctagttcttcttgaatattattcatataatgctcgtagccatcttctaggattcctgtgtagaactctccttctgcaccagaaccatagctaaataacccaattcggcttccagcttttaagtcactattttgtaacaatgacattaatgataaatatagggagccagtgtaaaggttaccaacttgacgtgaaaatagttgacttgcggttaattgtgttcgtaatcgttgagctacctcatcattacgatctttgagcagcccttctaaccctttctttcccattttagtaaatggcatatggaatgtaagggcagcaaaatctgctaattctcgcccagttaattgctggtaacgggtaaaagtttgaaggaaaaattcaatataaacattagtagagtattttccatctactaaagcttctgttgcatataacggccgccaaaagtccattatatccttactataagcaaccgttgtatcttcaagggttaggatgtgagggttccgcgaaatcagcattgcaactgctccagctccttgagtcacctctcctggcgtatttaatccataacgagcaatatcagcagcgatcaccaatacagtttcttgaggattaagcgccactactccctttgcaaattggatagcagctgttgcagaataacaagcctctttcatttctaccgttcgggtgaagtcgctaagccctaataagcgtttaatgtagattgcactcgcttttgaattgtcaattcctgactcagttgccacaattactgtcgaaatatttttttctaattccggagtaagcaattttttcgctgccgtagctcctaaagtcacaatatcttgcgtaggtggcacaactgcctgtagatcctgtccaattccaatggtaaatttattaggatctacgctgcgttcttttgctaattcaacaaggtctaaatagtcatttgttgttgcaaaagccattttgtcaataccaattctcatttcttatcatcctcttgtcaaataattataactgatccatcgtcttatttagtaattcatcgaccttattatttccagcattcgttgcatgacccttagtccaatcaaaatgtaaattagggaactgaggtaaaagggtaactatttcttcccatagcttctgatttgctaccggcttgccactagcagttaaccatccccgtcgctgccaattagttaaccagcctttcataattggatcaagtacgtaatgtgaatccaaaatcgctgtaattggttgatcttggaggccaagttctaatagtttagttagtgcttgaattaaagctgtaatctccattttattattagtagccccaaattcgccagcagttcctgtataagcttgatctttagtttgaataaaataagcccaggccgctttatcatctgccttaacatgctgtcccaatttattgccatgattacgggagcctccatcagtataaacaagaatgttatcagaataatcaaccgttttagtcgatggtacgatatttcccgtagcctgaagccactcattagcacctttaaacgttaaaaagcttttgaacttagcattcggatatccattaacttccttctgacattcagcccaagttttatatattcctggatgacgaccttttttgactgcataatatttttttaccataaaaatcccctaattaaatttcaaattacatcatatattagaatatcatatcagcaagaaatcatttctgcaaaattattaaatagctatttccttgattgagttagtgtaagattttcataggttggatgaataattcatctggtcgtggaaatcttttttgtagaccaatttacttatttacaaaaaaagaaaagaccagtagcctttagtgtgtcgaatactaagcaaaggcaggtctttcctcatggatattttaacagaaatcgagcagaatttggtgaaatcaggcagtttatttgaagctgaacagattattttaaaaggggtattggagttaggacaagtaatcatgcaaaactttttggaaagcttagatcgaagcttaaagtcccaagctccagcgaactatcaagtaattaataaacagccacggacgcttaattttatctttggcccggtgacttttcaacgacggtattatcaggctgggacaaagaaacgtgaattttacttagaccaacaattaaaaattaaaccacgtcgtcgtttatcgccacactacttaatgatgatggctaagattgcccaaacaactacaatgcgcaatactgccgacattttgaaccttgtatttgacagcggaattactgccgattcggtaatgcacgccgtgcatgagttaggaaatcaggtagctaaacaaactcaagcaaaagaacaccaagctactcctcgccatatgcctaaaaatttaactattgagggtgatgcctttatgattaaaggtaaaaaagaagcaggtcagctgactcttgtgcaccattatcgggtttatgagcgagtagctaatcaaatcattaatcggcatgactttctcagtgttgggcaccaaggacggcttgaagcacgactaagtgattatttagaccgccattataagcttgccggtcaaacgatctttttggccagtgacgctggcccaggttacgaaccagctaagctattaagtctagttcctcaaagtgcacatggtgaatactttctcgaccgctatcattgtttgcagaaaattgaacatactttaggccggcacaacgaattagccatgcgagcaattaaagccgttcgtcatcatgatcaagcagagctaacaataattttagatacttatgaatcacaaaacctaacggaaaaacaagcagatgacctaatgcgtttaagaaagtatctacagcgaaattggcggtatatcctctcaccacaaatgcgtggatttaaggatattcatttaattggttcagtcgaaagttctcaccgggcttttacttaccggatgaagaaacagggcaagtcatggactaagcagggggctaaagccatgattggtttaattgaagcccgaatgaatggtgaactgcaagctagtttaaatataatcctagaacaattaacagttcttcctcgagtggctcaaaccagcctattacaggaaatgcatattcgaactggagagtttctaagaaaggcaccgacaaagccgtcaattggagcagtacaaggaataattccgattaacacggccacaagtagaccaatgggacaactttttaaggcactaacccactaaaactgtatatttaaaggctacctatgaaaacttgacagataccttgattgatattctctttacgctttacaatttttttgttacaataatatagttgaaatggagacatactcaagtggctgaagaggacggtttcgaaaaccgttaggcgtgtaaaagcgtgcaggggttcaaatccccttgtctccttagataattaatcagaatgttaaagggttgttcaaattgctttatatagcggtttaacagccctttaatttatcacaacatttcaacatatatcactttttgttctcaaaatgttctcaatatcttctggctggcaagatacatatctacttatttaaatacatattccaatcgtcacaatttacgtggcgttttttatttatcatcacaaaaaaagttttctcgatttctggaaacactacccttggtttaattccttctctaacaaaataagatgatcaattacccgtctagtgatttttcatttcgtttgagagcaaaaaaagccggactaattaaagcccgactaaggaaaatatggatatttattctaccaaattaaaaataagaaagccattaaagactttaacccacactctacaaggtatgccatgttgtggacattgagtgccaaccaaacaataacattagtcagtccacacatcaaagaagccgttgtattcttgtccgtcacgactttatacttcctatcgcttaactaagcgacaagaaaacggttatactttatttccatataaccatcccctttccaattgaataaagctttctactatggtgactttgatagctatattctggaaggagtttacaaggcttgaaagaaaataaatactgtaatgctggctgtattgctccaaacacttaatgttcacgggaagttttactcacttcccgctattaattataccatacattttaggtatataacgcatcaatctatactagttatctatacaagcgcccgcaattgttgaatcatgcttaacacttggtaaggggtatttgacatgtcaatacctctattttgataccaaaattgcgccaacatctgaacagcgaacgtatattgttcatactgggttaagtctgctgtggggtttacagcgttttgtacataagccttagcgttctttagataatccttgattaattggtcttcttcttcaccgtcaagatataaggcttgcttaaagttgtctacttcccactgctctacatcaaatttcattaatttcaccttcttttagaacacatctaggtctaactttttagcaacatctactataaattgatcacgtaacttgtacgcttttgtagtgctacaccatatatcgccagttgctactaggttctttatcgtcttatgattagggttaaaatagcattctttaattatcttctgggtacagtccccagcgtcttgtaatgctaagtcaatagcttctttctcacgttttaagcggtgcatatatctatcttggtcaatggttattaacatatcatcgtaataagtccatggtcgattgatagcacgtccaccacctacattttcatctcttttgcggatagggtgcattagttcaaacttacggctttttagtttcttattaattgaaggataatctttcagtattactattactagactttttacttcttttcgcattaatacacctcataaaaaaagagtgggcgatattgcccaccctgtgctagtagctattatttactttcggtcgccttagttgtggttaaagagagattaaaagcagcgtcattactaattggttggtagtcattacggacgataacagataaaccttgactgtaactgtcgaacttgtcccattgggctgtaacttgattacgccggaatactgctaccgcttctgaaatatcacctaaaatcattggatgtgaaccgtctgtgttatctggtaagaacttattactaatcttaacaacgggttggccaagtaaagaaaatccactaggagcggttacatctggttgtaataagtaacgtccttcattgtctttcaaagtatctaatacttggaaagctgattgatttactaaccatgtagaagtactttgtaaggctgggtcaaggtcaacgttgaatacttgcttcaagtcgtcaacattagctacggttttcttagtaaagttatcgccttgtaataccttgataatttcagcgttatcagtgttatcaactaacttttgaagttggttctttacttcagatacaatatcaacttctgaatcgtcaacaacttcatttgatagtgcaatcttaccggcacgggtctttacatcaaacttcacatcttcaaacatattagcgtctacatcagcaatttctgcttgttcttccttagtagtaagtaccgctgtgttgtaacgggtagcgattggataatgaccggaaccagtccctacagtctttacagtagcgtactttgctaagttataagcactgttctttaagtctaggactggagtaacaacttcttctggaataacggcttctgcccccttagttgttaatccgtcacgggtttcaccacgtgaacgaatgaagctttcaaaggcgttagctggttgttctgtattgtttttggggtctaagattgtgtgttgcattttattatgttcctcactttcgataaattggttgtaactacgaatgcttgttttatctacatcaacatttgtctgatcatatgaaggcactgtaacggttgaaacctcaaataaatctttaatctgattaacggtgcgtgtaatttgtccgttgtcgtcacgtgtccaactgtcagaaccatcatcaacatcaaaacggaaagacatagaattaatgttcccattcttaacattattaagagtgtcacttgcgtaacttacacttgggtcaatagttgccttgaagtgaagccccttatcgtccacatcaagttgtaatgaaccagccttaacgcttgctagtggcttagtgtagtcgtgttgatcaagcataactacattggataggtctacgttatcaagggcgctagggtcaatcacttcaacaaaaccgcctaagtccttgctgggttgattaaagagtaacgcatagccttcaactgtattaggctgtgaggcttgcgtttcatcttggttatcttgctggtcttttgttgggtcttctttagggcttaccgtttgtaaacctgcgttagttgttagtcgtttctccattggctgtaactcctccttctttttcaataaaattatctccattagttaccggcactaaattaagtaaggctcgggcttcattgcgtgtgtagataccgttaacataaccatcaactgccatctgctgttgagcggacgggtcaaggcttaatagcttgctattatcaaagctaaaatcttgccctagcttgtagttcaattcagaagtaaagcaatcttcatagtgctgtaaagtaccttgtaaatactgaacgttactttgttgttggttgctatgctcgttttctacacctaaacgctcgggtggtagtccgaacgctttcgcaatttgacgggtattccagtcattagaatttactagctttaacacgtctgtattaagtggtaggcttttaacgtccataccatcatcagtaacaattgtgttaagtgaattattgccggtagttgcctcatcaaattgttttctaatgttctctttaccatccgaactaagatcagcttggtggacttggacaactgttgtgccatgaattccattattaaagaatccagtcattaacctgtttccagccgcctgtatcttcatttcatcttttagcgcatacagtggcgatagtccgactaaaccatcacgggtaaaatacttaaaatgtaagatgttagaagaggcaattactcgcttaatacgtccatctgggctgtatgtgtaagtcagcttttgcgttacatcatcttgctggacagttaatttattgttaggaataaaatttagcgtgtgtgaacttaaatcaatttcggcaaacgcattaccatttaatagcatttcaaccgctagggcgtacttgaaacttctgccgtccattaactcgttaggatgatcattaatcatcttgttatataggctagaactagacttaatcggattactggcaagatcaccagcgatagaactaattgcagcaaatatatcactattacgtaaagccgaagcactaacgtaactattagggtcattactagaaagacttactagagcgtctagaaaggggtcttgtgcgcttgtagtcgttgttctcttactaaataggcccattatctaccctcctttacttgtgattatcagaatagttaatcatgaaagctagaacaatcatttcaataccaagaaagccaatcccaaacaaccaaccggttaatcctatagcactgatctccattagaacgcctccggtgatcaacaaaaccggtttaatatagctagaaaagatttttagcagtttcatagtattcatttgtacgttcttgctcctttctcttagtgaagtaatcataaccagccgcccaagcatccataagagcagcaaggcaatctattttattttgctttctagtcttgtctaataacgcttgaccattaaagttatatttcaatattgcatttcctacgttgtaagctaacatctgattgttagtgtgaagaatgttaccagcaattaattcttccttaaaagtcccaattggtaccgataaattcttataggattgtgttaattgaagttgtggtagtcctgcccgttcaaaacgattaacaagatcagcccatttataagggtcaaatactaagaatttaacatttagattatacttaccgattaggtccatcacgaaatcatatacggaatcataatcaatcaagccactttctaatgaactgattgaacattctccacgtttagcagccatttcataatcaattccatcacgttttgatttagtaacaattccaccataacgagatacaaaggcgtgggaatcagcgtaaaactttccatcttctaacggaactaaccaactaatcgccgttaaatctcggctttttgatagatcagcaccaatataaacatctctattactaatatctggagctttttcaatcaatccatgttcccaatcttgcgtactaatatatgaattttcattctgctgtacaaacatattcatattctttacaagtacgttattaatattattttgttttgtggctacatctaaatcattttgaatgtgttccctcattgtcttagcaatcttaggattactcatcaaaggattagctttaatccacattgtggggtcgaatatttcttcttttttatcaagacaatacataaccgcaaagtaacgatcattcttaattttgccgttgagtatatcggctgcatagtcccattcatttttgaagggtgaattaagattaaaaccagcagtagaaataatcgctagaataccattgtcttgttgagccatacctgaattcaaggcgtttagaatagtgttatctttagcttggtgatattcatcgactacgcccagtgtcgggttataaccgtccgtactgtgggtatcagtagatagtggaattgcgaagctacctgtctttttgtcagtcacccgttgtttattgattttcactcgttgccttaaatactttgaattacgccgtaagttttctagttggtcactcataatatcaaacgcaaggtgtgcctgctgggaactgttagcagtaaatagtatttgtcgattacgggctggttgcttttccataagaagagacacaacgccaatcgctgccagtaagaagctctttccatttttacgggcttcacttaatagaatccgattgaagcgcaatgaattatcgtctacctgtcgccaaccatagatattagataagataaacacttcaaatggctctagcttcaatggttcaccgtttgtttgtggtaagctctcaacaaatttaataaccttaccagcatacgtttcagaataataataaggaaagtcatcggtcttttgctttttcatgtcgtctaagaagcgctggcaagcatgaataactaacttaccggcgattaactcacctttaacaactgaattagcatactgaatagctctatccattatgacaacatctcttcaaactcatcagtaggagcttcttcactcattgccttgtggacttctaggcgtacccgtgattgtgggctaagtgccatttgactatcaattgacttcatttctttaatagccttatcacgtgccatgtagtaaggtgactgctgtaatcctcgttttgtatcaataactaccccagtacgatcaatctctttagtacatttgataattgttgaatacaaagtacagtgagtagcgattaaactaacatctagttcgctaataggggcactcttctttaagagtgggacaattctacgccattccttttttgctacatcatcaagccatttaggggcgtgagatgttaagtttgggtattctgccaatgctttttcagcgtcttcacgttgtgctttttctgccttagtaatatgaccttctggacgggtcttcattggttgagccaactatttaacctccttctatttatttggtgacaccatgtcactatttgtttaaaaaaataaaaaaaacatcatttcatattcaattatcgtattatttaacccttattataccatatttgaatagtttgttaagttcaatgcctaaaagttataataaaaaatccttgacatttgaggctctaaattatttaataaagttgaaaagaaaaccatacaaaataaaaagaaacgtcttgaaatcttcggattttaaggcgtttttttgtaaagggagaatttttttaaaagaaacccccaccattacggctcctaccggtctataccaatagcgggggtattaaaattatttcagctattcatatttattttcctttctcgttgatgatcttttcttgtcttttctcggtgacaacgatagcaaagtgattgtagattagttgaatccaatcttttactccaatcttcacgtataggtacaatgtggtcaactaaatcagctttttttactattccctttcgtaaacacataacacaaactgggcttttctggagcgtttgacggcttaatttaacccacttactcgttttgtagaatctattatagtcatgaggagctttggcgcttctttccattcgctttttgtatacttttctattgtattcatgtttctgttctttggtcatctttttatagttatctcgttgccaatgtttacgcttgtcttcatattctttttgtagatattgatgttttttacaaaaatattgacctactggaatcacctctcgacaaccagcagcactacaaaaccttactacactcatttgataacctcctatgaaaaaagggcatcgcataacacgacacccttagcacttacttattaattaattccattgccttactatatgcttcaagcctgcttatgtgccagcttttaacatcgttaaccgttctcttaatgcaagcttcaagctccattgtatcggcgctgtaagggtcacactcgcttagtctataccttgccatcatcacccagtcttggcgactttcctctgcgtccttgcatactgccacttgtgcaatacactttactagctcttggttgtctggtagtcctagatcaatcgctaatggtaatggactgccatttactgagactaattttaaactataaagcgtagtatacatatgataattagaaggatcatcaccgcttgcctcaatcattacattaataaagttgttatactctgggtgcgtgttgactgttaatttactcatccccatttcacctcttatttatgactatcaagcttgcgtaaggttacaatatcatacgccaataactcatcatcaattgaccaaccagcaactttatagatactgccattgtattgtgcttctggatatttcttcatgtccgttaaatctttcttgtgacgaactaccaatataacatcatcagtaattgaactacctgcctcactaatagcttgactagcactgattgaatagttaccacaatgtactgtcacatctcctacaaaacctgtcatgatcataccagtattcgggttacgtttccccgtaccaccttcatgaccgaatgtgaccttatgctttaatcgtgtaattgcgtatttattacttcgcatttaattattcctttctgcctgtacttgcagatacaagcaatagtagaacgtttgcagccgttctagtgaaatctactgttactttatttttaactccttaataggcttttcacctatccggtggtatgtggtcactgcctcaaaataaaagtacggtaaaagcagttttaattgttaattttcatctcttcaattgaaaatagtttttacttttatcggttaccccgtttcaagtacccacaatcgcctttatatcaacatttatatggtaaccgataggatataaaggtaaccgatacattgcagttacttaatatagtaacccgaaactatcggttacctcaaaatgctttcggttacctttaaatagctttatatcaagctttataagaacttctgcaaaggtaaccgataaatataaaactataactaatttttaagagcaattcctttataacctttaacatttttaccgttaatcttaactgtagtgtgtttgtatcctcgtgctattagctctttcgcaaacttacgattactaagacaaggaacagcagtatttttacaatactctttgtaattatcatatagatatactgatttttctttatctttctcatttgtagtacagcaatcattaatccaattaccgatattgtcattagcatttacccagcttcgcttttgctgttccatgtattcagtcactggaaacttaccagaatcaagtgcttttttataagattttaagcattcataggcaaatgctggcatttctcttttaaagtcttgctctttgaattgctctttaaaatgtttaatcttatggaacgttacaataattggtcgtcttttaaatccgtctgtaaaatcattgaaggctggtaaatcattagcgctaaaaatcaatttagcttcattttcaagtttaaatggatctttatatttaaattgagctgttgtagtgtcgtcaccagttaatgttttaataatattagtctgttccataaatttggggcttatatcagcaaaaacattagcagctttatgatacagctgagaagtagcaaatttagcttctttttggtcggataatgcttctaaagaaacgtttgaaacgttaggcttccctattaactccattagtttatttagaaatgtagatttaccatccccacccaacccgtatagaatcatataaatttgaaagtccttaaaactacctgctaaagcaaaaccaataaaggcttttactgtttcaattgctgttaggtcatattcatcttgtagttttccagtatcatcacggatttctttagttgagggtactaatgattgttttaaccatttattccacgttgtagcttttccttttgtttctaattcatatggtctattttgtaaaagatagttctctggtgaattatcttctaaagtgtccgtcatcaagttgtaagtgtgtttaccaaacactgctttataaggtgctggttgatcaaatggattgtcttctacaatttcttgtgaatctaaggcaattaatttagaaaccgatgctaataagttcgttctccatattccatgaggtacaatttcatttttgattgatttttcaatgactgaatcagcgtaatttttccattgtctacttttaggatcgaaccaatagccgtgttctataaattggttggatgtaaagtgatactttttttctaaatatttagccaacttaatttcatcaaccagtttatttcctttatcacttacagttaaccattctggaaaactattgttatttactaagtcatcaatattagccatatttttcctctctttacatggtaatttagcgtttgtatttaagactgataatctctacttcgccttttgttttgatatattcaaagcttttcccgtctaaacttgtttcttcgtatatattgtcccaatcgactattgattgatcttcgttttgactagcattattccaatacttaaagagtggtgtacggtgcagtattcggttaacttgtttaacgtcatcccctgtgtagtagagaagataaaaacacattgcaccaatagcaggtttaacgctatgatatttatttaggtagtaggaaattatttcctcattatttttataaagagcaataaattttctactacttttactactaacagctcgttctataaccttgtaatcatcgttatagtattcaagtgctttctgaaactgtttctttgcgtactcattaaggggatgtgacgttgaattaataattttttccatcttgtcactatctaataaaggattaacggatagtttttcttcaaaacttaacactattaatcacgtcccacctattgcaattgatcatgaatttgatctaacttatccaacaaaatactagatagtgctaacaatgctttcttacgtgatactactgtttgagcaaccgtagacacttgttcatcactcattgctgcataattgtctactcgtacaattggagcaaaaacatcatttaactgatcatacagtgcttgggctattccggttgtttcttcaacattggaatctgcttcccacaactgattttcaaacgctagttcttggttcttatctttttccattgtttaaaccctccactcatgttagaatgaaagagaattaaatattagtaattcgtccaacatcccccgtaaagattgttggcttttttattagctaaatttaattctctaagttttatttagtcgttgttagtgtctgaattggcgttctcactatcaacggcttttttattaccatccataaagtcgttttcaaaatcagttaaagttttatattgaattgctaaatctttaatttctttagcgaccttaataatttcatctgctgaggaaatcggatcatctgcaattatttctccattttctttagtgatagtaccttcaaaacaatcttcagtaattgaatttatataactgccagctttaacaatcctgtcttctatatcaataattcttttacttaatatttcttattcaaattttttagtgtataaactcatttcttattactccttaaaataagttactaattgcaacaacaatacccagcaatggtaaaaacgttgctagataagcccaaaggcgttggtctggtgaagtccaccagtaagctaaaatcttaccatcaattttttgtaacatatgtctcacctcctcctatttatttctctacaatcacttgccagccagctgtgcgattattacttagaattttcttttacccaacggtcaacatcttcacgtttatatacatattttcctccaacctttgatgatggaaaatttcgggtcttaatccaacgatcaatagttgttcgagaaacacttagataatccgcagtttggcccttattcataaactctggttcggttttaacagtcttagcatcttgtaacttattgttctctagctttttagccacagcttcagctaactgatcaatgaactgatctaaaatagctgtactcattattatcacctctttatttcatatcgtaattacaatatataacataatgaaatattatgcaacaacaaaataaaatatattgtgttttgtattgttattttcggttatgtataatatattaactatacaaggaggaattaatgtgaaagaaatttcatctgaccagaaaataggttctaacattgcactaattcgtaaagctaaaaagatgactcaaaaagacttagcaagaaaaattggaatatcacaaccagccttggggaattatgaacgtggccagcggattatacctgcttcgatttttcacagtttacctcaaatattagatgttcctctagattttctagtctatggaattcccaacaatattacctttcatgatttagcaacgctcgattccgtatctctcaaaaagaaagctgctcatattgaaaatgatagaagtattattgaacgtgggttagggcgtgacgacataaaaagacatttattagctgctgttttgcttgataattatggttatcttgtgtacccagatgaatctagcaatgacaaagaacatgaacaacttaaaaaatttgtttggaatacattagatggattacttaccggcgtaccaattaccaatgaaataaattttaaacaaattaatgaacaatttgaattacttgcaaatacgtatttaagcctaattattgacgaagaggcaaatcgctatcctgctttccgcaaggatttaccacccttcaaagaaaaacttacacagtttttaaatgataacggatattttaaaattttaaaaaaataattttaaacctttctctacaatctcttgccagccagctgtgcgattgtaggaggaaagtaaaaatgtcagtatacaaggataaaagaaatggtacgtggtatgttaaataccgcattaatggtaaatcaaccagtaagcgaggtttcaaattaaaatcggacgctgtagcgtgggaacaagaaaaagctgtggagcttaaaaaatatggtcaaatgaataaccataacatgaccgttgaagagctatcaaaaaaatggttgccagtatatgaacagactgggatagaaaattctactattcataaaacaaaacaaatcattaaaaatcatattctaccccgcattggaaactataaagttgctgatcttagcattgagttattaactgaagttgctgctaaatggaaagaagaattagtaaagagtgacccttttaactatactaagcgaatgttagactacgcagtacaattaagagcgatcccaactaatccaatgaattctgtagtaaagcctcgtaaaaaacatgacaaaacatttactaacaataatttctttaatgaaaagcaacttcacaattttatcaagtgtataaaaaaagactacgaagaaaaaaatcctcgtgctttcatggttctatggttagccctttttactggcatgagaaaacaagaacttcaagccttgacgtggcaagatgttaaatttacaaaaagcggtggaataatccatattaacaaggctattaagaacgcaaaacatccctatcttggtggccctaaaaccgctaactcttatcgctggatttcaatagataaaaaaactgcttcctatctaaaaagatggaaacagcaacagatagatattttaactaaactaggttttaatccacaccaaaaagagcaattgattttctctacctacactaaaaataaaattgttttaggtgcagaattggacaagccgttaaataaagtaattgttagaaataatctaaagaaagttacattccatggattacgtcatacccatgctacacatttggcttctattggtacccagccaaaattaatagcagatagattaggcgatacaatggaaactgttcttgaagtttatattaatgcagatactgaaccagaacaaggaatcgccgacaagttcgccgatagtttagtataatgttctcaaaatgttctcaaatttcaattaaatatttttaaaaccctttaatatcaaggattataggagaatttttcaaattattagaagtccccttgtctcctttatctaaagttttgctgatattcaatcgttgttaaaacgttgatatatcagcttttttattacacaaaaaaggacacctattaagtgccccaatctgtcttgaactaatcttaggttatttagttttattgattagcaatatcgtatgtagttttgccatctttggccgtatacaacgcctgactagaatcacttggattcataatactaattgaatatccttcacctaatgctttttctacttgccctgaattgcttttaatcgacttagttaagttaggccagcccatttgttcagcctgacttggatcttgcgctaaagctttcaatgcttcaaccgtattatcatcagttggcgtgatctggaatgtcttactatcttcgttataatcaactgaacctaattttgaataacccttttgcatttgacgcaaaacagccattgtcttactttcttgttgcgcttcatttgcacttgaattgccaatcgctaatccatttgaaaatgatgaaaaactactggaccgcgccacttgtgaagatgaagtactttggcttgagctagcagaattattatgatgaaaataaggtaaattaatcacaccataaacaattgcgataatactcaatactacaataattgtcccgcttttccattcgcgatactgttgccatgaattagcaagataaaaaccacccaaaatcaaaaataaggctcccattattactaagaaaatcataaattaactggctcctttttatcaacgtaatgttattgtcccgcattcattttatatatacaactataatttaaaaagaaaaaaggctagtatccccagcctcctcctaattaaaattccattaatgccttcatatcgtaatctttaagcttatcgcgaccatgaagatcttttaattcgattaagaatgcacagccaacaacaataccacccatttgttcaaccatatcaattgttgcagagattgttccacctgtagctaagagatcatccacaacaagaacccgttgtcccggtttaattgcatcggcttccatttgcaaggtagctgttccgtattctaagtcataagatgcactaattgcttttcttggcaacttaccctttttacgtgctggagcaaatccaacacccagttcgcgagcaataggacacccaacaataaaacctcgcgcttctggtcctactaccatatctacctttttatccttagcataatcaactaattcgtcagtagcttgcttaaaggcagccccatcagccattaatggcaaaatatctcgaaagataatacccttttctggataatcaggaacactagctacgtatttataaaggtctaaagccatgagataaatagtctccttattctaaatttaaatatttcaataaccagttagcaaccgttgcagcatcattgaaaagcaactgttgttcaactttatattgtgctaattgtttttgataacgtttagtttgcgttaaatcagtcttattagttgactcattaaactttaacacatcatcttttattgtaacaaatcctgcttcagaaaacacttgaatcattagatttaatcgatccatattaatctttaaatgattgctaactgctttagcttgcatgggccattttaattctttttgcttataaataaatcgataaagctgtgcaaaatcattccgtgttggcagtccagctaaataggcactttttcgctgatacagtaataagcgaatagttgctggttcttcttcatcctctgcaaaaatccgttttagcatttcttcactagatgggcagtcaaccagcgttacttgttgaccagaaaaatcagtcttaattgcttcttcgatcgataaagtatagccaggagccacatggggagcaatattttctcgcaatcttggctctcttacaatgtaataatctgaagaactaaaaagctgaggagttagtttattcgttcgttcatcaataattaccgttccattaatttggagatcttctaacatcagttggacactttttttaccacgccactcattaagactaactttaacggctaaattaatttgtccggttggcgcggataatagtgttgccaaatttccttgaccaaaagcaacgactgttagattttttttatcacttacaatcgaaaattttaaatgctggtgttcctgtcccattgttttgacatcgacaactttaacgttatttaattcaaaaaccggttccatatttcctggaccaaatggagcaacccgttgaatatcgttatataactgttgggtaacatcagctggtacaagtttcattgcgattggaagaggttgctttaccgttggatcaaatttttgtttgactgcttcttcttccaaggctatttgcagaggtacaatatttttctgatcaaaagaaagaccacaagcagcagggtgcccaccaaatgttgtaaatagttcacgatgagcctccaaggcattgaacaaattaaaactgtcaacgcttctaccagatccttttattaaggtcggattattttgatcagttgatgcgacaattgttggctttccggtctcattcataatccggctggcaacaattcctaatacaccttgatgccaaccttttccaacaattaataaggtctttttctgctggttagctgaactattagcttgttcttctgcctctttcataatatcagcaactaggttctgacgttctttattcgcctgatcgacctctttagctaatttttgtgattcattctcatctaaactcgtcagcagcttaactccatcattagcatcagcaattcggccaagcgcatttagccgtggtgcaattccaaatccaatatcctgatcagttagattgttagctttaatatcagctaatttcattaaagccgctaatcctggacgcatcccctgtcgtaattgctgaatgccataggaaattaacgcatgattttcgtccataacgtttactacatcagctatttcaccaattgcaactaagtccagttcttcaacaggaaactcaccagttaaagcccaggccaccttaaatgcaacaccaacgcctgacaaatcaggaaaaggataattactaccaggatagcgagggtgaacgatcgcaacagcattaggcaagtcagcaggcaactcatggtggtcagtaattacaacatctactcctgcttccattaccttatcgataacattttttccgctaacgccattatccaccgtaataaaaagctgggtaccattgtcaataaggcgttggtaagcgtccatgttaggcccatatccatctgtaaaccgatttgggacataataattaacattggcaccgatagataataacgtttcatacattaaggatgtgctagtaattccatcggcatcataatcaccataaatagtaatttgttcttgcttttcaactgcctgctcaattcgctcaactgctttatccatatcatgcaataaggttggatcatggatctcttctatcgatggttcaaagaatttttttgcttgttcggttgaatcgattccttgctgagctaataaggttgccaatattctagaaatgcctaactctttttcaagattatcaacagttgctgaggaagcattatcggcaagttcccacttaaattttgcatcaatcatttaaaattaaccaccatttcaacgccaaaattaaacaagaggctgggataaactcagtctcttttattttgcccctttcattttttgaaaagactattaaattctgtaatctctcgaaaataagggagcatattataagttcttcttatcctgttggaaatcaaaaaattttttaattgcccagtcacctaaaccgggaataacttggtaagcccagccaagacaagccacatatcctggaacattaatttccctcgtcttatacccaacattattccaaattcgtcgagctaagtcttcaggagagataaatatccattttggtaaatgggcccgatacgtataattattatccgctttatcaaagaaaggtgtatcaattgggccaggattaattgtcaacacttggacaccataatcagcaacttccattcgtaaaacgttatcaaactggattaccccagccttcgttgctgaatatacagcgctatttggtgtaggtaatttaccagctaatgaacccatattaataatggccccatacccttgatccatcatttgtttagctacacaccgactaatatacattaaggctaagaggttcgtatgtaccattttttccattgagctgtaagattccttaactacgggaataaagtcaccaagcccagcagaattaattaatacatcgattcctcctacttcatgttgaaccttcgaaagcacatcatcaatctgatcagggtcggtgacatccaattgataagcaaatgctggccgaccagataaaattaaacatttcttggctacctcttgcaatttctcaaggttacgagaaacaacaacaacaattgcaccacgacgagctgcctcaaaagccaactctttgccgattccacttgaaccaccagtaattaatacaacttcatttcgcagaaaacgtaacgtctttactcttctcagcattttttgccatctcttttcattttttaaacggaatatcaatcacatcaaaatcattaacaactcgagtatcaggaataatattacgaacttgatatgccaattgataggctgctttaccggtgtatcgtgctgaaatatgatttaacaataattttttaacaccagctttttttgcaatttcagctgcttgtttgctggttgaatgataataattgtatgccatcttcgtctcatctttagcaaaagtactttcatgcactaatacatccgcattttgtgctaacaaaattgcattctttgtttgtctagtatcgcctaaaattgcaataattcgtccaggttgaggagtgccaataaagtcatgaccatctaatacgcgaccatcaggaagagtaaccgtttttccagcttttagttgaccgtaaattggcccagatggtactttttgttctcgtaatttttcaacttgtaattctcctggatgatccgcttcttcaatccggtatccaaaacaagcaattttgtgatccaactttcgtgcaatcactctaaaaccatgatcattaaatagttccccgtcatctgttatttcaacaaaatgcaaaggataactgaggcgtgactcacttacttgcaaagaagtctgaacataccgctttattcctattggtccatagatcgtcaatggttcggttcctccttgaaaagagcgggaacttagtaaaccaggtaaaccaaagatatgatcaccatgcaagtgagtaataaagattttttctatctttcgtggcctaattgtcgtattgagaatttgatgttgagtagcttctccaacatcaaataaccaaattgcgtttcgttcttctaacaaccgcaatgcaacacttgctacattacgttgcttacttggggaaccagcgcctgttcctaaaaattcaagttgcatttatatttttcctacctttgctacgtataattttattgaataaattcaaaaacaaatttttcaattcttacaagatcaccatcttgtacacctttagctcttaacgcgtcatcaacccccatatggcgaagttgacgagcaaagcgtaattgactttcttcatgagttaaatcagtcatcttaaataaccgaataagtttttcaccgcccaatacccaggtgccgtcttcatccttggtaatggtaaagtccgtctcatccttcttgtcaggagcagcagcacgatattcagcgaccaattctttatcatgactctcactatcaaatgcgggtgtcttatctaagagatcagccgttaattgcattaattgttggacaccttgatgagtaaccgctgaaatagggaaaatctctggctgcttttctaaagtcttatctgctgccaaatcagctttaaaagcagctaagttatcggcagaatttggcaaatccatctttgtcgcaactacaatttgtggtcgctttaataattcaggatcgtaattagcaagttccttattaatttgccggtaacgttcaattgcttgatgaggatcttcactactcatatccactaggtgaagaagaacgcgggtacgttcaatgtgccgtaagaacttcaatccaagaccgatacccttcgatgctccttcaattaaaccaggcatgtcagccatcgcaaaatcacggccatctggtagcattaccattccgagattaggagttaatgtcgtaaattcatatgcagcaattttaggcttagcaccggttactactgataataaagttgactttccaacagaagggaacccaattaatccgacatcagcaagcatctttaattctaattctaagtaatggtcttctcctggttcaccattttcagcaatttcaggagcagggtttttagcactagcaaagtgaatgttgccgcgaccaccacggccacctttagccactactaattcttggtctttttcaacaagatcaccaataatctcgccggtatcaaggtccctaacggtagtaccttggggaacagcaataattgtatcttctgcacttggaccagtcatctgtttactcattccattaccaccgtttttagctttaaaaattcgatgataacggaaatccattaaagtccgtaatccttcatcaacttttaaaatgatgctaccaccacggccaccatcaccaccagcggggccaccgttaggaacatacttttcacgacgaaatgctaccattccatcgccacccttacctgcatgtacttcaatttttatttgatcaacaaacatattcataatgattgtctccgttctttagtctattatttagtatatttaaaatttacaagcctgtcaaaactcaatcatgactactacccttagcaacctcagcatttttctgcaatgaaaccttgattaactgggcggtaggtcgattaattcctagtgaatggatttcatcaactgaggcttgagcaattttggtaattgatccatattttttaagcaattttgttcgagttcggggtcccactcccttaatttcatccaaacgcgagcttaacgaatgcttggtatgaacgcgccggtggaaagtaattgcaaaccggtgaacctcatcttgaatgcgttgaactaagtaaaagccttggctccgtggattcaaattaatatggtgatcatcatccccgaacaataagtcagcggtttggtgtttatcattctttaccatccctactaccggaatatcgagaccaagttcattctctaaaacatctttagccgcatccatctgaatttcgccaccatccataaagatcatatccggcattggcttattctcttttaagagacgcgaatacctccgtcgaataacttcacgggtactggcagcttcgtcagcatgattaatcaccgttttcaatttatacttccggtaaaaatttttagctggttctccattaacaaatacaaccattgcactaacaggatcagccccctgaatatgagaatgatcaaacgcttcaatccggtgaccttctggaagtccaagggcatccgtaatctctttcatcgcaccggtagtcttactttggtccatctcaagcagtcgaaatttttcatctaaagacaactgagcattttcatgtgccattgctaagaggtcccgtttttcaccacgaaccggtgtccgaactggtacccctaatatttcacttatttctttattgggaaggcccttaggaagaagaatttcacgaggcaaaatattattgcgacgattataaaactggagaataaagctagtcatttcttcaactgccgtatccacgattggaaatagacgtttttctcgtttcatcaaccgcgcctgccgaataaagaaaatttgaatagaaagccaccctttatccatatagaaattaaataaatcacgaggggttttatcatttgaaataatcttttgtttttcaactgtcacttcaatatagtgaagctggtctcgaatttcagcagctcgttcaaactccatgttttctgctgctagttgcatctttttggttaactgtcgcttaactgtcgctgtatttccacttaaaaatgacttaatttttttaatttgctcttcatattcgctcttaggaacgtctttaaaacaagctcctaaacattgtcccatatggtaatacaaacacggacggccttgatacccattacatcgtcttaatggataaaccttttgaataaaatgcatcgtctcctccgcagcatagacatttggataagggccaaaataatatccaccatctttttttattttactaacgatcttaatttgaggatcccgctcatttgttatttttatgtagggataaccagttcccttttttaatttgatattgaaataaggttgatgtttttgaataagcgttatttcaagtaagaacgactccttattagtcgaagttacaatggtttcaaagtccgcaacttctgaaaccattttagctactttaccggtgtggctactcttaaagtaagaccgaacccgattttttaaatttttagctttaccaacataaattatctgatcattaatgtttttcatcaggtagcaacctggcttgtcaggtaacaatgctagtttatgttctaaatgttcactggccatcgcaaaatccctccgaaaaattatctaacaatatattatatctgaaaaatcatcattaaggcaaagaaagtgtttagaaataattgtacatttagcaaaatttatgctagcattttgtcaaatataaaaaaggagctaaaaaaatgggattagttactagaagaagcgaacagcttgataaattatttgatcaatttgcggttgatcctaaaaaaccaaaagcaactaaaaaaaatgacgataaaaaagaaaaagatagcaaggataaagaaaagaaataatcgagtaggagataattgattagttcaattatcgacctctcacaccaccgtacgtacggttccgtatacggcggttcgacaacttaatcacattgaattgactggagcgtcttggacatattcataagtccgagttgttccagttttctattagttagagaatagctcaaggtcttactgtgtgcagttcgccagtagcccttgcgggtactagcgaagacatatgcatcacgctgggacagccccagcttctgtaagttagttaccttagttttaagcttcttccattgcttccagatatactgtcttattcgggccctcaaccacttgtcaaggcgttgaataaagtcagttagtttcccaattgagtagtactgaagccatccacgcatttttcgatgaatttcttcaaacattcttgtcagggatattccacgattacgtttagttaataacctcaatgctttctttactcgttgttgcgattgttttgctggacgggcgtaggctccattgtggtctacacccaacgaaaagccaagaaactttaaccgtagcgggctaccgactttggttttatctgggttcactttaactttcaatcgcttttcaagaaactgggtaatgcttcgcattactcgttctccggctcgttgacttttaacataaatgttacaatcatccgcatagcgcacaaagtggtgaccacgtctagtcaactctttatccaactcatttagatagatattcgccagtattggtgacaatggccctccttgtggggttcctttttcactcttagcgaaaagcccatggtctaagactccgctagttagaaacttacgaatgagccttagtgtccatgggtcatcaatatattgttgaagatacttaatcatcaagtcatgattaacattatcaaaataggcttttaggtctaagtcgacaactcttcgataaccttgattataaagatctactacttttgcaatagcgtcgtgagccccacggtgagggcggaagccaaaactattatcagagaaaacacgctcaaagataggtgtaagaatttgggccacagcttgttgaaccattcggtccaccactgttggtattccgagttttcttactccaccattaggcttcggaatttctacccgtttgactggtgctggtttatacttgccctcacgcaaactagcgatcaattccgtcttattttctctgagatatggcagaaggtcattgactgtcatatcgtcaatgcctgctgcccctttatttctcttaactcgcaaataagcctgattaaggttattgcggtccaagactaagtcttggatagtgacactcatacctttaccttcaccataatcggtactacgcgcccttgtgtactttcggttttccaaacctatcctcgacaagcggtcagcttgttgttctgttttctgcgattgtcgcacctgattacacctccgatataagttacaagttattgtcgttcagtccttcatctgattactcagactactatgacctcggctgacttctggcttactcaacgctacatcactgcaccgcttgtttctgtggaaattaaacttattcctcttgtcggaaacgtgtaggccagatctccccgggtaaggatattaactttcgtaccatgtcaccggtagctttactgaaagtaacttcgagtagtgttggactttaacttgtcatgcagtcttatccagttagttccagccttatagctacttcttgttcatcggtgcagtactttgccttagacttccttcagattccacctcgcagtggacacccttgtcctcagctcatggttccgactactacggcccatagcggactctcaccgcctagctaatacccatgccgggcgcacatgcaaaggaggctgggagaaaacttttgttttctcccagcctccactacttttatgaacaatagtaacgtggaactaacttcgcgtcgccacaaggctcgagtctaagtacgaacgataatcagcccgtgccgtgctaatcatcgccctagcttagccaactgctttgtcgagaaggctattttccactctctatttttaatcttgctttttaaaaccagtcggatagcgctgatttaattcctcaatatttgctttggcaacctcttcaaatggaatatcggcccattctgcaatttgagataaataccataagacatcacccatttcgtggattagttccttacgatctaattttcgactacgaaaagtatagttttttactaaatcaacgacttgtcctgactcaccagctaatcctaatgcacaatttgttaaaacttgttcattcccatataaggttcgttttgctgcattttggtattcattaaaatccaacttagttcttccccattcgctcttcaatccactgccaaacatcatctttaccccttttctctgtagctgaaaatagaataatcggtgttgaactctcaacatcaagggtctttttgataaggcttagttggcgattccatgcacttcgttttaccttatcaatctttgtccctacgattaatgttggaatattataatattgtaaccaattatacatatttacatcatcaggagtgggttcatgccgtgcatcaactaattgaataactccgcgtaattgttcacgttgggttaagtattgttcgatcatttttccaaatcgttctcgctcttttttcgagactttggcatacccatatcctggaacatcgacaaaatataccttatcctcaacgtcatagaaatttaatgtctgggttttacctggctgactagacgtatgagcaaaattgcgccggttgattaagacatttgtcaacgatgacttcccaacatttgaacgaccaactaaagcaatttctggaatatttgttttaggatattgttcatcacttacggcactgattgttaaatctacattgtgaacttccatttgcttacctcatttcattaagaagctttttcatcctttaaaacgtaacgaggttctgtatgttgcgttacacatcgtttatcaataattaccttttctacatctttacgacttggcaagtcaaacattacatcccgcattacatcttcaataatcgaacggagaccacgagcacctgtatttcgcttgattgctagttgtgccattgctcgtaatgcaccatcagtaaaggtcaacttacttccatcaaggcgaattaactcttgatattgcttaactaatgcattctttggctcagtaaggattcgaacaaggtcatcttcatcaagtttttcaagagcagtcatcacaggtaatcgtccaataaattctggaatcaagccaaacttaagaaggtcttctgggataacatgttgcaaaatatttttatccgtaacctcttcagcttctcgtgagtctgttccaaatccaattgtcttatcaccgagtcgttccttaacaattgtttcgattccatcaaaggctcccccaacaataaagaggatattcttcgtatcaacttggataaattcttgctgtggatgcttacgtcctccctgaggtggtacattagcaattgttccttcaagaatctttaaaagagcttgttgaaccccttctccagaaacatcacgcgtaattgatacattttcactcttctttgcgattttatcaatttcatcaatgtaaatgattcctttttcagcacgttctacatcaaagtcagcagcctgaagtaatttaaggataatattttcaacgtcttcaccaacgtatccagcttcagttaaagttgtagcatctgcaattgcaaacggaacatttagaattcgcgcaagtgattgggcaagataggttttcccagaaccagttggaccaattacggcaatgttgctcttttgaagttctgtatcattattatcgccactcatcattgcattaacccgcttatagtggttataaacagcaactgctaatgtttttttagcatcaccttgaccgattacatagtcatccagttcgttaacaatctctcctggagttggcacacggaaagcttttttagcttcatcttctgctagttcctgatcaataatttgtttacaaaggtcaacacattcgttacaaatatagacgccaggaccagcaacaatttttttcacttcatcttgggactttccacaaaatgaacagtgaactgaatccataccagtggtatcttcaaacataaatgaacctcctctaagacttattaaaacataataacaaaattactgtttaatttcgacaaattactcagtaaattattttctactttatcttactaatatttgattaaaatagcgaggctggaagaaaactactgttttcttccagcctcattgattagtaattatttaacaaattacttgtcagacttttcgtcatccttaacttgctttgctgaatcagcaactaagtcaacagccttacggatcttaatatcatgcattaacatgtctttagataatgccttcttaacagcatcttcttccataccgtattgctttgcaaggtcagaaatttctttagcaatttcttcatcagtagcatctaagttagcatcgtcaacaattgcttctaagacaaggttagtctttacacgttgagcagcatcattagcaaattgcttcttcaaatcttcttcctttgtaccagtaatttggaagtacatttgaggactgataccttgttgttgcattcctgctaagtattgttgcatttgacggttagtgtcatcatccaacattgcttgtggaatatcttggatttctgcattagcaacagccttattgatagcagcatcttcaatagcagccttagcttggttatccttttcttcttgaagttgcttcttagtcttttcctttaattcagctaaagtatcaacatcttcgtcaacatccttagcgaaatcatcgtcaagttctggtaattgcttttccttgatttcgtgaatcttaaccttgaaaagtgcatccttgccagcaagattcttagcgtggtaatcttctgggaaggtaacatttacatcaacatcttcatcagcgttgtgaccgattaattgatcttcaaaacctggaataaatgagcctgaacctaattctagtgagtagttttcagctgaaccgccatcaaattcttcaccgtcaacgctacccttgtaatcaataacgacagtgtcgcccttttcggctggcttatcttcttttaatacaagttcagcttgttgttgacgcttagtttcaagtgcatcatcaacatcagcatcagtaacagtggtgtcttgagcaggaacttccatacccttgtattcacctaatttaacttctggcataacgtcaacttcagcagttaatacccatggttgacccttttccatgctcttaatatcaatcttaggttgatctacaggttgaatgttagtttcctttactgcttcgttatatgcatcaggtaataccttgtttaaggcatcttgatacaatgattcttcaccgtacatttggttaaagatttgacgagggacacgacccttccggaagcccggaacagtgatctttttacgagtctcaacgaaagcttcgtcaattcccttgttaatagtgtcgacatcaatttcaaatgtcaatgtacctttgctggcatcgctatcgcgttcccattttgctgacattttatttcctccaataacaaatcaatttgactaattaatatttataactagtctttacatactatattagtttaccgtaggagaccagtaattgcaacttattgacggctgatccccaagttattttcaaatatttttgttaaagaaaaagacttgggtttccccaagcctttcagcacatctgtactcaaaaattagtctaagatgtcggatacaacaccggcaccaacagtgtgtccaccttcacgaatagtgaacttaagacccttttcaagagcaactggcttttgtaagttaacagtgaacgtaacgttatcaccaggcataaccatttctacaccatctggtaattcgatagtaccagtaacatcagttgtgtggaagtagaattgtggacggtagtttgagaagaatggagtgtgacgtcccccttcttccttagtcataacgtaaacttcacccttgaagttcttgtgagtttggattgaacctggttcagccaaaacttgaccacgttggatttggtcgtgtgaaataccacgaagaagtacaccaacgttatccccggcttcaccaagatcaagagtcttgtggaacatttccaaaccagtaacagttgacttaagaacgtcttcagttaaaccaacgatttcaacttcgtcaccgaccttaacagtaccacggtcaatacgaccagaagcaacagtaccacgaccagtgatagtaaatacgtcttcgacaggcatcatgaatggcttgtcagtaggacgctttggagttgggatgtagtcatcaataacatccatcaagtgaaggataactttttcttgttctgggtcaccttcaagtgccttaagagcagatccacgaacaactggaacatcgtcaccagggaaatcgtattcgctaagtaagtcacgaacttccatttcaactaagtcaactaattcatcatcgtcaactaagtcagtcttgttcaagaatacaacgatatattgaacaccaacctgacgagcaagaagaatgtgttcacgagtttgtggcataggaccatcagtagcagcaacaacaaggatagcaccatccatttgtgcagcaccagtgatcatgttcttaacgtagtcagcgtgtccaggggcatcgatgtgtgcatagtgacgcttttcagtttcgtattcaacgtgggcagtgttgatagtgataccacgttccttttcttctggagcagcatcaatatcagcgtaatcttctgcctttgctaaacctttggctgccaatacctttgtaatagcagcagttaaagtagtcttcccgtggtcaacgtggccaatagtaccaatgttaacgtggggttttgtacgttcataatgttctttttcagccattaatgaaaacctcctgataatttacaagtataatgccagatcatctgattcggtgactgacatacctttatacatattgtacaacttcttttcgccaattgaaagctttaatcttaggctctgaagaagaattcttaaatataatatcaactatctgttcatttgtaaatgtatttgactaatgtttttctattaattcgtcaatctgcttacctagtcgttcctgccacgtactagaaaccgtatttgttgcgactttctttccttctattctagcgattaaaacatctgtccattcatcaatatctttaataatttgattaattcgcggatataagaacattacctgtaattgaaattcttgaattgccatcttttctgtctgcgggttttgatttccacacttttctgtaattaatctcttaccttcactaacgactggcaataaatttaaaggctgaatatcagctggcacaactgtatattctctcttatctagccaataaacagtaaccggatctgcaacttgtaacttactaagcagctcaaccaaactagactttaccagtggatgagtgtagggatcacgaagcaggaatttagcgcctgtaataaattcatttaaaggaagtttaaaagccgcctgcagcctactttgctgctcttcaagggagtaatctcctaaatgataaaagtctcgcaaacgtgtttgtaatgtctcctggtactcttgacgagatttttcctcccccattgtaacaattgtcagcaaatcttcctgccattgcgaaagactactaatcatctgtcttgctaaaacaaataattcattttgacacaaaattttaatggcaatttgagcatctgccaagctatcaaacattacttctaaatactcaaacaagtaagtacaagccctggtatattgttgagaatgatacagagcgattatcgtcaatcgaccgatttctgaatcatcaacctcgtttataagatcttccagaatattactagcttcttgccatttttcttcagcaattaatttttgagcctggagatattgatcttgttggggttcgttcatttttatcacccttttttatttcattactttatacaattgttcataaaagcagttgaggctgggagaaaaacgaaagttttctcccagcctcccttcacattacttatattaaacagctacttcttttcttttgccattcgttttttaccacgaccacgatgatgctctttcgttgaacgtgacttcgcagatttctcttctttcttctcaacattgtttttaatcttcttttgatgttgattaatctccataataactggcaaaataactggatgccgtttagtttgatcaaacaagaatcggtttaatttatcgcgaacatcttgtttcaagtgactccaatcaaattccttttgatctagattttcttgaacaatcttttcaactaagtcagcactctgttgcattagttgacggttagtctttacaaacacgaatcctcgtgacgtaatttgtggtcgagcaacgatctttttctttttccgatcaatagttgccaccacaacaaaaatcccatcctctgacaggacgcgccgatctcgtaaaacaatattaccgatatcaccgacacctgttccgtcaatcatagtattacttacatcaatatgttctccaacatggaatttaccatttttgtaagtcagaacatcacccttattaacgaggaagatattttcttttggaactcctacttcttctgctaattccgcatgacgatctaacagacggtattcaccttgaattggaatgaagaacttgggtttcatgaaattcaacattaattgttcatcattttggttagcatgtccagaaggattcaaatcatcagaaataaatttaacctctgctcccgtacgataaatcatatcttttgtcttttgtacctcagtctcctgcgcataagaaggagtagtagtaacaaagacaagatctgtactcgttaattgtaaattaggattatcgccgtttgcaatttgctgtaatgacttaatcggttcacccattttaccagtttctaaaataacaacttggtttggttcgagtttttctgcttccttgcgactaataaataagtcatctggtaagtgtaactttcccaaagacattgctgtatcaataatttgttcaatgtcttttccagataaaacaatcttccggccaacggctacagcagcattgataatctgctgtacacgcataatatttgaagctacactagcaacaataatccgaccgttttgatatttaaaagtttctttaatatagtctccaatatcttgttcacgagcagacgcacccgtaattccggccccagcagaatcacttaaaagtgctaatacaccttgtgatccaatttccgctaaacgagcaaggtctgtttgataaccctttttagctgtctgatcgaatttaaaatcaccagtgtaaacaatatttcctgctttagtttctaaaacaacccctaaagtttcaggaatagtatgggtcgtctggaagaatgaaactgtaacatcattaaaatcaattgctgttgacgcatcaacaacatgaaaatcattaaacttcttaacttccttatggtttttaactgccagctttgctaaggcaatcgtcatctcgcttccaaataccggaacattaaagtccatcaagaaatacgggagtgctccaattgaatctgcatgtccgtgtgttaagaataccccgactatcttgttcttatgttcacgaagatattcccagtcaggaatgacaacatcaattcccattaattcattctcaggatactttaaccccgtatccaaaattaaaatttggtcttcaatctcaacggcgtacatatttttaccattttcgcgtacaccaccaaaaggaataattttaatattattatccattgatttggctcctttaatatttagttttgaaccccttatcgattacaatatgtagcgataagaattttatatcgttcattatagttataaatatcttaccacaatcagtgaaaataatggagtaaaaacaaaaaacaccttgcctccaagtagaaggcaaagtgctttgataataaaatattaccgacgtaaacctaacttttggataagttcacggtaagcaggtaaatcagtccgacgtaagtaagctaataagttacgacggtgaccaatcttcttcattaaaccacgttgtgaatgataatcgtgcttgtgtgtacgaaggtgatcgttcaattcgttgatgtcagcagttaaaacagcaacttgaacttgagtagaaccagtatctccttcgtgagttgcgaattccttaataatttgatctttacgttcttttgaaatagccatgctattttcccacctttcaatattaatgcgcctaagatctaagtataacgtcggtgaggatcgttaaactgagaagaggcaattaattacttgtttgaagtaacctatacaaatatacataaaatttactaatgttgcaactatttctatgaaattttgacttgatcgtcgttagctattgcattgctcgctagtcttttgtataatgacaaatgttgaaaattctggtcaactgaaaatcgggtaacggaggtgaaactcatgccaattatcaaatcagcaattgaacgtgttcgtactagtgaaaaagctgaagcacgtaacgcttcacaattaagccaaatgcggactgctattaagaagttcgataaggcaaagcttgctggcgcagataaccttgacgacttatacaaggctgctatctcagcaattgaccgtgcccactctaagggccttatcaaggctaacaaggctgcacgtgacaagtcacgtctctcagcacgttacgctaagtaataaaaaagcaactattaagttagttgcttttttatttttaacttttcgcaaaaagaggataagaaaacaaattttcttatcctctttttgtatctcatgctcctttgctctgctgagaatactgtaacataaataactgaaacaaaagtgaaggatcgcgttgtgtcgtttttaacgattgttcaatacgaattaatcccaaataggcgttttctaacgcctgcattgagaaatcacgcgcagtttttaatcccaatttaatccgataaggatggacattaagctgactcgctagactcccttgcgtaaggccgcgtttacttaatacttttatttgaatcaacagccgaaactgccctactagcactgcattaatccttaacggcggttgctggcccgctaatagctgttgatagagatctaaggcctttatttgattatgcttaagaaccgcagtgactaaatcaaatacattttcatctaatgattgcggaactagagcggctaccatgttttgatcaatctttttttcatggtaagccaaaatctttaatttagttaagcttgcatccatcatcccataatccgcattagtccgttgaaccaactcatccaaagcagcttctgatatttcaaaaccagcagttgataattgagttctcactctttgacgagctgctcgttcatcaagtggactagcatcaactaaaactgctgtcttctttaattgctttacaatcccttttcgtccatcaagcttttcataaggggccgcaaaaactaaaattgtagacggttcagggtgttcaagatacttttttaagctatccaaatcatgttcaactttcgaatgtcttttctcaccagttaagaagaacggtttattgataataactaatcgtcgttcaccaaaaaatggagtcgccatcgcatcatccaaagcaactgccaatggtgtggcttccatatcatatcgaccaacattcataacctgttcattctctggaataaggcttataaaggcatcaattgcctgctgttgaaggacctgttgtttccctaaaattaaatataccattgctggggttttagtttttaattgtgtagataattgggcaatgtccaacttgtctcatctcccctcaatgttgtttttatttttccatttcgaccatggtatacatattgtatcattccaaattgctgcgttgataagtaattaatatttaatctttgaaaattttttattgttatttcatcaggatggcgatacctattaaatcgtccagctgaaattatcgcatacttaggagcaactgtctgcaaaaataaataactactagcagttttactgccatgatgaccagcttttaagatatctgactttagttgcggatacttttgaataactttttcttcattttcctggtccaaatccccagtaaaaaggaatcttttcccaccaaatttcccagctaacactaaagaatcttcatttttcccttcacccggaacaaaaggatgtagaatttgcaatggaaatgatgacaacttaacattatcagtcaccggaattatcattggcgatgacttttcagcagtccttactttattaagaagtgctggttgtctttccatccccgctgggacaatcagtcttttcactgctatattatccaaaatcgttgttaaatagccgatatgatctgcatcatggtgagttaaacaaatattatcaatttgcctgatgcctttacttttcaaataattaatggttattcgttgggcatcatcttgagaatgctttgaagtcgcccaatccggctttttaaaatttaatttgcctcctgtatcaatcattgttacccgtcgattaaaaggttctctaataattatcgagtccccctgtccaatatcaacaaaggtaacttcgccattaagtggaaaatgaattatccctccagtaattacatacaataaggctaatatcttccatgattttaaagatgtctcttgagaaataacaaataaagatgccgcaaataatagaagggccaaaattaacggtggcttcccaaaatgaatcattcctggaaaatcagataaccaatttaaaatatattgaaaacattttaaaccagcattaattagatacgcgagtggttcaaaaagcttaaaactaagtgccccaaccaagaccgctggaaaaacaactgtcgaaaatagcggaattattaaataactaaccccaaaactcagaagatgaacctcatatacataactcaataacgaaggcaaactaattaaattcaataataaagactgcttaaaaccacgtactgattctggaagaacttgaagaataaaagaaagcaaatagcttaattgaccgcctaatgtaagcaatagcaacggatcaataactaatccaattaataagctcagtgcccatccatcaagactgtccaaatttaaatatcgatgaagaagaccaagctcagccataatggttgctcttatcaagcttgttgctccaccaccaacgagaagataaaacggtaaaatgataattaaaaataaatcaattgattctttacgccaccataaatgaactaacagccgccgtaataaatcagtgaaaagcacgatatgcattcctgaaatgcaaaaaagatgaagcagaccaagccttttaatacttaccattaattcagccgaatcctcattactgctaccaattattaattgttggcaatacgtactaagaggaggcggtaaagtttcaaagtagaggctgattcgctttcttaatgtatgacaccagccaactattcctcttttttgcctaaccatttgctctacccggttaatttgaacttgattacagatccggcgatggtgattataagtcaaattatcaaattgattttcatttgtacggggaataatcggttttaattgcccattaataagccatatcgagggtgttgtaagcttatcaatattttttagcatctggggtgacttaaacgacatcattattgcttcacgttgtccagtttgaatgtcgattgcagttcctgtcataaaatttccattgaattttaattcatcagggtaaactaatattttttgagtaacttccatttgcttattcgccgtaatagttgtccaatttttttgtaaactgtaacataaaatcgccatcaataaacatatcagcactccaactccaagtactattggcctttttaatacggcaattcggtaaaatatagcaattaaaagaaaaattaaccaatatgaactaaagaaactaaccgctactaaacttgcaattagcgcaggaaaaaaccaaaagtgttgaataatctatttttgatctgggttgatatactggtccagatcgacctcttctaaaatatcactatctaatttaatctgatgaagcgcaacattttttagtttaagtaatttcattgcataatcatcattgtgataattacgaatataatttatctccttaattccagtctgcaataaacttttggtacattgtaaacaaggaaaatctgttacataaatacttgccccatcagcagaaataccaaacttagcacactgtaaaagagcattcatttctgcatgaatagttcgtacacaatgtccatcacgtaaatagcagccttcatcaatacaatgtgcatcgccagcaactgatccattgtacccaccggcaattattcgcttatcacgaactaaaactgcacctactgaaaggcggttgcaggtacttcgcgacgccaataaagctgcttgaatcataaaatactggtcccaatcaattctcggtttcatattatttcactcctctatatttgaaatatagtatagcaaatatcttcatcaaaaaaataaaaactagatagataggtgatcttttagtttagcaacagttttttcgccaaaaccatttatttctttaagttcgtcaatactcttaaattgaccgtgttcttgtcgatattgcaatattaaatcggcttttttatcgccaatccctgtaatttgacatagttgttctttggtagccgtgtttagatttatctttgcagaactatcgctgccattttcattattagctgctgatggttctgtactgctggaaactattggcgtttcgccttgaagaggaatatagatcatctgctggtctgttaattgtttagcaagatttacttggcgcaagtctgcattgggtagtggtccacctgccgctttcaaggcttcgttcacacgatcatctgctttcaattcataaactccgggcatttttacggcaccctttatatcaattgcaacggtccctttcatcgtagtggtagaagttaaactacttcctgtttcgctacttgttaaaacagcattagtatttgaaattaaagcatcgttattatttttattaagtatccaatatcccccaactactgcagcaatcactatcatcagcacttgtactcgatattttatccataattctgataattgctgcatgtttctcacctccctataaatataaatacgaaaaaaaataaattttgcattaaaaaaagcaagagaccttcattttgcctcttgcttttcaatttacttatgcgtttgtaaatatttcactgcttcgtcaaaggaagtgacagggacaaccttcattcctggtgcatatttcttagctgcttttttagccatttgataattagtcagatgaccttcttcatacttaagaatctctttcgttggttttatataaggggcaaagaaaatagtggctcccgcacggtgcgcagcgattactttcttgtcaattccaccaatttctccaacggtcccgtctgaatttattgttccagttccagcgattttacgtccccgttgcaaatcttttccactaatttgttgatatatttgcaaactgaacattaagccaccagatggcccgccatattgaccagcatcaacctttactggaaccttagtcttaacttgcatattgttagtaagaatgatcccaattcctggcttattagtattggtaattttaacaagcggatgggtgacagttttagttttcccatctcgagtataagtaaccactaacggagtgccaacttttttagcaccaatatatttttgaaagccttgagcggtattaaagtgatgaccatctacttttgtaattgtgtccccaacatgaatatcatgtttaaatttagaattaggctgaacttgcaatacataaattcctagatagcgtcgcgttactttttggtgagcggcattataagcaactgcaattgcctcgttaatcgagctatccatataaaatttttggacacggtcatacgttgcactattttgaccaccagttacatcttccgcactctcaattgacatatagggcatcattttggcatataaatatgttgcaggatgggcacgttgaatcgccaccgacgtcaacataaaacttcccttatatcgatcggggtgtccctttattttaacaaaagactgtaaatcagcagctgttcccggactttcaatataagaatttaggggccagaacaaaaagcagcctagtaaaaggacaagccctaaaataattcctatccgtcgcaatattacattatcttgctttttcattgtctttcttaacccgtaacatttctcgttccattaaacgcttttttagtgcttcattaatattagcgggaaggtaagctgagatatctccccagccgatgttacttctttcagcaaactactagataagtgctgatattcaggcttagcaaggaaaaagacggtctcacactgatcatctaaaaagttattcatcgccgcaatatcacgttcatattgaaaatcagtagtattacgcaaaccacgcattaagtaatctgcaccaatgcggttcattagatcaacagttaagccttccgttgtaataaccgaaacattatctagcccactaacagcctctttaatttgcgctactcgttcttcaacagtaaacagcgggtttttactttcattagtcattaccgccactgccaattgatcaaacaacgcacttcctcgcttaattaaatctaaatgtccaagtgttaatgggtcaaatgatccaggaaaaactgcaactttcattattttgattctcctttatattgataaattgttaaaaccgtaattccatattcttgacgacgaataaagttaaactcagctaaatctgtcggcagtttcgcattctgatctgtttctgccacaattattgcatctttagctagcaaattatttttaaccatctgctccatatcattaacaatttgctgtttagcatagggcggatctaaaaagaccaggttaaatttcaatttgtcttttgcaaacaaattcaacgctttgtgagcgtccattttataaactttaaattgttcaacatgttttgtaacgtcaatattcttcttaattgttttgattgcttgatattgacgatcaactaagactgcctgactgattccgcgcgatacagcttcaatacttaatccaccgcttccggcaaacaaatctagactggttccgccattaaagtaaggaccgattatattaaataatgcttctttaactttatcagttgttggacgagttgccattcccggaacagcacttagctttcgtccccgaagtctcctgcaacaattctcattttttatcatcctcatcatgtaattgatagacccctgttaattcaagatcagctaacgtcgggtctaaatctggccgagctgataattcaacctttttcactgcgcgtaatcgacttatcttctcttttattttttcgacatcactttggtctacatacattaccacataatgcattcgtcgggaaatataatcaatctgaccataatgacgaagagctcgaatcacacgattattgttaatgtaaattattagggaacgccgtggaattaatttaaacattctttacgcctcctgtttcaggaataaatggtttccccataaccaagcgatcccgattttgctgcatactaatattcattataatgcctaccgttgcagaaagaatcaacatacttgatcccccataactaataaatgggaaggtaacccccgtaatcggcaagagtcctagaactccaccaatattaaagagtgtttcaatcgtaaagaatgttgctgagccataacagatgagcgtttgatacaaactatctgcccgcaccccaacttgaataatacgacagatcaaaaagagtaaagtaactaaaattgccgttactccgactagacccaattcttcactagtaattgacataataaagtcggtattgggctctggcaaatatcccattttttgaatactatttccaagtccaaccccaaatacaccaccattgctgattgcataataggaattaactaattgatttcctgaaccactagcatttccaaagggatttagaaaggcaacaaaacgcgcaacttggtatccaccgccttgaagcaaaccactttcaactagtcgttccaatccaaggtagccaagcgctggtaagacaagaattatttccaaaccaacgccccatttataatccgccgctaaaagcatgattgcaataatcgctccgttaatcgccattcctccaatatctggttgaatcataatcaacccgagaaaaactgcaattatgagccaaggacctttagcatcagtggtaaaatgttgtccacgttgcctaattttagccattcgatcagctaaatataagataaaatatagcttacaaatttccaccggttgaatattaaagaagcccaaggatatccaacctttagctccgttaacagcccggctaaaaaccaaaacaatgacaagtaaagcaccaactaccaatgttgaatctcgtaaaaaccttggcgttcgataatgccgcaaaggataatttgccataaatgccattaccgcaactcccattacaacatagattgtttgttttactaaatatcctaatggggttccaccattttgcatttcaatggaagcactagctgaatagaccattacaattcctactaaacataaagcaaggtaaggaactaaaatataataatcaaggtagcggacgttattccatacagaacgaatcttacggaatcttaatttctttttcttcacaaagtgcacctacctaaaaacaaaatacaatcattattatacaacaaaaaaaagctcggaaagctagttagcctcccaagcttttttaaatatttacttccgtgaagcagcacgacgacgcttagcttccttttcacgggcatttgtgttaagggtcttcttccgtaaacggatattttctggagttacttcacagtattcatcttcatttaagaattcgagtgattcttcaagggagaagtgagtaggggtcttaatgtgagccatttcatcagaaccagcagcacgaacgttcgttaagttcttacccttggtgatgttaacagtaatatcattttcacgactgttttcaccaacgatcataccttcgtaaacttccgtacctggatcaattaataattgaccacgactttcgatacccatcattgcgtaagtagtagccttaccagcattcatggacacaagagtacccttttgacgaccagggttccagttcttgataactggtgcgtatttttcaaaggtatggctcatgattccgtaaccacgggtcatagtcataaattcagttgagtatccaatcaagccacgtgatggtgctaagaagataagacgagtttgaccattttcgcctggttccatgttcttcatttcacctttacgtttagaaaggctatcaataactgcaccagtatattcatctggagtatcgatttgaacttcttcaaatggttcactcattactccatcaatttcacggtaaataacttgtggacgtgatacagataactcatatccttcacgacgtaatgtttcgatcaagatagaaaggtgtaattccccacgaccagaaacagtccatgcacctggatcatcagtatcttcaacctttaaggacacatcagtttgcatttcacgcttcaaacgatcttcaagctgacgggcagtaacaaatttaccttcacgaccagcgaatggagaatcgttagtccggaaagtcatttgtaatgtaggtggatcaatccgtaatggagtaattgcttcgggatgttctgcatcagctacagtttcaccaacattgatgtcttccatcccagaaaccgcaatcaaatcaccagcttcagcttcattaatttccaaccgcttcaaaccgaagaaaccaaaaagcttagtaacccggaaattcttctttgagccatcaagtttcattaaggtaacattatcgccgaccttaatcttaccacggaagacacgaccgataccgattcgaccaacgaagtcattgtaatctaagatagcaacttggaattgaagtggttcatcagaattgtctactggagcagggattgtcttgataatagtatcaaacaatggcttcatggtgtgttcttgagtagaaacatctgaatcataacttgaagtaccgttcattgctgaagtgtaaacaactgggaagtcgagttgatcttcatctgcacctaattcgataaagaggtcaagaacttcatccacaacttcttcaggacgagcacctttacggtcaaccttgttaatcacaacaattggtgttaagtgttgttcaagggccttcttaaggacgaaccgtgtctgaggcattgtcccttcgaaagcatccacaacaagtaatacaccatcaaccatcttcataacacgttcaacttcaccaccgaagtccgcgtgtcctggtgtatccaagatgttaatttggtgattatcatatttaacagcagtattttttgaaagaatagtaataccacgttcacgctcaatagcgttagtatccatcgcacgatcttcaattgagaagtgttctggtaaagtatctgattgcttcaacatttcgttaactaaggtagtcttaccgtggtcaacgtgggcaataatcgcaatgttacgaatgtcgtcacgagttttcaaaacttgattctccctttcgtcatatcatttttaagtcgaacagcagcggcctatcaatcgccaatttcataaaaaaactgtgacatcgcggtcacagcctcgacaactaattgatgatctgtcgaatatctcgactaacctgcctcgttgctactaatacaagattagatgataacacattaatagaactaccgtcaattgatttcacaactaagtctaattcttctgctaacattcgcccagcagcaaggtcccatggcttcaaattagagatatatccacctaattgaccagtgatcacaccaatcacctcaatgcccgcacttccatacatccgtaagcctattgcgtcttgagcgattttctttaatgctgaatcaccacttaaagttaatgtccgattcatcgctaacaaactctctcgcaagcctaagtcagctggctggccaattttttggttgttaacataaacaccagcaccctttcgaccatggtaaagacgattattaattacatctaaaatatagccaagcatcggttgaccgtcaacatacaatgctaacataacagcaaaattattatgctgcttaacaaaattcattgttccatcaatcggatcaacaatccaaacatgtccttgcatattgcttatttgtttgtcgccaaatccttcttcacttaaaatttgactatcaggatcaatttttcgtagttgatcatttattaattgttcattttcccggtcaattgtcgttacaaggtcagtataattcgtctttgtatcaatctggtaatcattttccattttctggtatgcattttgacctgcttgacgaattatttgttgtgctttttgatctaactcttcaatactaatcatttttttgcctaaccatcttaattcgcttatctgttgactcttgtgctgctttgacaacacggtagagaacataacccgaattcttttcaaattcgcgacccaattgtttctcttcagcctttgagggaacgacttgcttaaaggcacgataacaatctaaaattttatctctatcaatcgcaacttcataagcatcttcaaccgccctaaacatggcaattaccgtttccatctctttagttgtccatgatagatcaaggggataactatagttatgtgaattcatttttttgtccctccaatcattttctacttgtattatacaatccaaacggaaatttaggaataaaaggcctaaaagaatccaaacagaaaaagttcttagtgatttcaaaatcgagtcatccatcactaagaacttttctaacttattaaaatttaaatatgtgttgggaagccaagcgcaatatctgcagcttcttgaacaggttcattcaatgttgggtgtgggtgaattgttaaagcaacatcttcaacattcataccacagttgacaatcaatgaaagttcaccagcaaggtcactaacaccaggaccgacaccttgagcaccaataacatttttcttatctttagtgtagattaagcgaataaatccttcggcagcatcaagagaaacagcacgggcattaccggcaaatgggaattgagcagtagatacatcaattcctttatctttagcttcttcaaccgtcataccaacttgagctaattctggatcagcaaaacaaaccattggtactccaacccaatcgttagcagtattcttaccagcaatggcaccagcggcagtcttagcttcaaagaatgccttgtgagcaagtgcaggaccaggaacaatatctccaatagcccaaataccaggtacattcgtccggccttgttcatcaacaattacttgatgacggtcgtttaacttaacatttgtcatatcaagcccaaaatcatcagtatttggtttacgaccaacagataccatgcagtagtctgctttaatgctcttttcgctaccatcaacttcataagtgacagtaacgctattttcatcttgctgagaatctttagccattgccttagttacaatgtctacgcccttcttttcaagattcttgacaacaatatcaaccatatcgtggtcaaatccaccaagaattgaatcagtaccttcaataatcgttacatgagcaccaagatcagcataggcaccagctaattctgtaccaatgtagcccccaccaattacaactaattcttctggtacttccttaaggtttaagccaccggttgaatcaataacacgaccttcaaacttaaaatgaggaatttctactggacgacttcctgttgcaagaattaaattcttccacgtgatagtacgaccattatcattatccatgaattgctttggaccaggcttgattacacgaagttggtggtcattatcaagaattgcctctccatcaatgatttcaactttatgcttcttcaaaagcatcttaactccacgaatcatacggtcgacaactttatggtccttccattcttgagtcttagtaaagtctagctttgcatcggttttagaaataccataaatagatgagtctaaagtttcttggtaacggtgaccagcagcaattaatgctttagatggtacacatccaacatttaaacaaacaccacctaaacctggttctcccttatcaattaaggtaaccttttgacctaattctgaagctcgaatagcggctacataaccaccaggacctccaccaacaattactgtatccttttgttcaacatcagccattatctagccctccatcatcaataattctggatcatgtaataacttgttcatgtagttcaatgcatgttgtgcaagtccaccatcaattaaacggtgatcgtaagtcaatgataacttcatcattcgaccaacaacaatttcaccatcttcattaacgtatggttccttgtcaattcgaccaacaccaagaatggcaacatctggttggttgataacaggggtgaaccagccaccgccaattgaaccaatattactgatactgatagtccgaccagccattgattccggacttagcttgttatcaaaggccgcttgagtattttcggtaatttcttttgcaatctcaaacatgctcttagaatctgcattcttaatatttggattatagagaccgtggtcagtgtttgtaaggatcccaacattatagtagtgcttgtaaacaatttcttgagtagaatcatcaattgaagcatttaattctgggaacttcttgcatgtggcaactaaagccttaataatgtatggcaagaaagtcaagtgaatatcttgttctgcagcaactgccttgtacttcttgcgactagccattagagcagatacttcaacttcatcaaatgatgtaacatgtggcgagatatcctttgattcacgagtagtcttagcgataatcttccgcatattagacattggttcacgttcttcaaggtcggtattccatggcttgattgtattaccagcggtcttagctgcaactggagcagtcttagctgacatagctgcactcttttcttccttagctggagcagctgacccattaaagttatcaatatcttctttaagaacttgaccgtggttaccacttggttgaacaagtgaaatatcaacacccttatcacgggcatattgacgaacagaaggcattgccattacaagcttgtttggttctgcaagtggagctactccaccctttggagaattatcttctgaaggagaatctgcagctggagccgtggatttttcactttcagtagcttcttcactgcctgtatcagtttcatcatcgtcgtcttcgctttcgacgtttgtactaataccaggcttaccatcatcaatttcagcgagcttgtcgcccttttcaacgtggtcgtcttcttttacaaataattttttgacagttccatcaactggggataccaattgagtagtcgatttatcagtttgaatttcaattaaaggatcatcagctttaattgcttctccttctttaacgagccaagaagcaacatcaccttcagttaatccttctcccatttctggtagtctaaaaatgtatgccatatcgtattaacaccctttctattccgcacttttagtaattaattacttctcgtacggcatcctcaatatcacgtgcacctggaagccaaacattttcagcttgtgggaatggatatactgagttaggagcagcaacccgggtaacaggagcatcaagatacataattgcaccttctgaaatagctgatgcaacttgggcaccaacaccagccatcttttgcgcttcttgaacaatgactactctgtgcgtcttcttaattgattcaaagatcgtgtcagtatcaagtgggtaaagagaacgtaagtcgataatctcagcagaaatattgtccttagctaatttcttagcggctttttgtgcttctgatacttcaccaccataagcgataattgtaacatcagtaccttcttgaacaacatttgctttatccaacggaacagtatacttgtcatcaggaacttcacctttgactgaacgatagagacgaaggttttcaagaaaaagaactggatcgttattttcaattgcagaaataattaatcccttagcatcataggcagaacttggtgcaacaacccgtaatcctggaataccaacgaagaagttttcaagatcatccccgtgtagttcagcagtatgagtaccaccaccataaggagtccgaatagtaattggtgcatgcttagtcccattgtattggaaacgtatccgtgacatttgagcagcgatagaatccattgcttcaaaagtaaagcccatgaattgaatttctggtactggacgccagccagttactgctaaaccaattgacattcctaaaatacctgattcggcaagaggggtactaaatactcgatcaacaccgtatttttcttgaagcccattagtcgcacggaaaacaccaccgtttttaccaacatcttcaccgaatactaaagtcttaggatcttcggctaaagcgatgtcaataccttcagtaatagctttgatataagtctttttagccatgattacttcgactccttttcttcgtacttcttaatttgttctttaatgtctggagttggtacttcaaacgtccgcttcaacatatcgctaactttttcaggttctactgagtctgcttctttcattgcttctttaaagctttgtttgcattcatcagcatatttttgttcttcttcttcagaccaaagcccctttttcgttaggtacttgcgaagacgaatcaatggatctttatcaaaccatggctttgtttcatcctcagtccggtaacgagtaggatcatcacctgctgaactgtgagcaccaaaccggtatgttaatgtttcgattagcactggtccattaccagcagcagcaaattcacgtgcctctttagcaacttcataacatgcaaggacatccattccatcaacttggacacctggaattccagcagcaacagccttttgggcaattgtttgtgtttcagtttgtagctttcgtgggaacgaaatagcccatccattattttgaataataaatacaccaggtacttggaatgcaccagcaaagttcattccttcataagtatccccttgtgagcttccaccttcaccagtgtaagcataggcaacagtgtccttttcaccattcttcttaattccaagagcaccaccagccatttcgaccatctgcgctccgataataatttgtggccggagagcacgtgcatcaaaaaggttacctttgatgtgtccctttgaccataagtacatttgagcaacagttgctccatgttgaattaattgtggcaaatcacgataagcagggaaaaggaagtcttgcttcttaaatgcagcagctgttcccatttcagaagcttcttcaccccaagttggcgcatagaaacctaatcgaccttgctttgaaaaactcattgtttgttcatgcaaggcacgtgcccaaaccatttttttcattaagtcaactaataattcatcattgaaattagccattaattcttcgttaacaacatttccgtcgttatccagaatttgtacgggttttgcataaggtaccccttcattggctttaatctcagcaaaattgacagctttggtattggccatattcaacattcctttccaaatccaattaacatcatgtaagcgattgcttacctacatttatagtataaccgattgcctaaataatacaagcgctttcataaacttaatggacagaattgttaaaatggtccaagtgaagtatacgttttttcaaaatttatagttaaatattgttatcctcatattcattagcaattttaaatagttatgatagactataatatgactgaatttttatatggaggcatagtgagtaatgtatttaatgaaagatattacccgtgatggcaatcccgttttacgtaaacgagctgctaaggtctcatttcccctatctgatgaagaccaaaaattagcaaaggatatgatgcaatacttagaagtaagccaagatcctgaattatgtgaaaagtacaagttacgagctggagttggccttgccgctcctcaagttggtgtttcaaagcaaatggctgctgtccttgttcccgcacctgctgaaggtgaaaagcccttatttaaggacgttatcattaatccagtaatcgttagtgaatcggttcaatatggtgctcttactgaaggcgaaggttgtctttcagttgataaagacgtgcctggctacgtaccacgacatgaccgcatcacattacgttatcaagacgttaacggtgaaactcataaggtacgattaaagcattatccagcaattgtttgtcagcatgaaattgaccatttgcatggggtgctattttacgatcatattaataaagatcaaccatttgaggcgcctgcagatacagtaatgattagttaatttttacaaaaaatggtcgagagaaaaatacactttctcccggccattttcactaattactattttgatttaatttttttaaatcttcaatgtactcaacagttgcttcatttatcaaataggcaatatcgatatgcaaaatcccctcatatttccaccaatcggttataataaacggttgagaggctttgggagccatctttaaatggtgtcgttttgcatattcattaagttctgctgctagtttttgacgtgtgaaatcatcaagattaatattttcttttttataatcaaaatggtattcaaaagcaagcacaccttttccccaaacatcggcaacaatttgagaatttagatttttattccaatgtaacatttctttcaaactagtatttaacgctgcatcagtaacgtcttgagcgtttttctgtaccatcatcgttgctcgcttaagaaatacgcgatggatcgttaaataaagagcaataacaattattgctgctaaaatacagattaagaatataaccatgactatcacctcgttggcctttacctttatttaataataccatgttaggaaaatttaagacacttttggttatctgtgatagaataataaagtaaattactgcataatatctttaattaaggagtttttaacagtatgacttttaaagtatactaccaagctgataagacaaaacgcccagttcgtgaaaacactcaatcattgtatattgaagctgattcagaagctgaagcacttttaatggttgaacacaacactgactacaatattgaatttgtagaacaacttgatgaaaaggcccttgcttacgaaaagcaaaaccctaactttaagttgacgacgttctaagcttttaatcattaacagaggctgagaaaaacgcttgtttttctcagcctccaactttcttatgaacattagaaaaatactgaattaattattcgaatataaatattattttgctttttggcaccattcaaaggaggaatattgatgaattattcaatcatcctcaaccgtcatgctggtaatggtaatgcagaaaaggcatggtcgtcaattaaaccggtcttagatcaacaacaaattgattatcacatggaaacaactaagtatcctaatcatggagaataccttgccagccaaatcgcccaatctcataatgcgggatcaacaattgtcattgcgattggtggtgatggtacgctacatcaagttgttaatggacttatgaagacggccaagcgattgaataaaaaaccacttgcggttggatatattcctgctgggacaggaaatgattttgcccgcggttacgggatttctatgcatccacaaagggcattaaatcaaattttaactgcagacgcaccacaaaaaattaacattggtcattatcatgaggcgattcggggtgaagaaggttattttcttaataatttagggattggttttgacgcggcaattgttagtcgtgctaatacgtttaaggctcgtcacaagaaaaatcatattgggcgtttcacctacctccaaaaggcaattggagtaatctatgatcaagagccctttaccctgatgattcaatctgggcgtgaacgctttatttttcctaaagcttacatcgcaattaccagcaaccatccatttatcggtggtggatttaaagttgccccaagtgcttcgttaaagaaaccatcattggaattagtcgtcgctgaacggaaaggatggcctatgacaatatggcaattgctgcaattagcccgaggcaatttagatcaatcaaaatttgcccaccacttccaaagcgataatctccacatcacaactacttcactagaatttagtcaaactgacggagaagaaataggtaatcgttttatcgacctcaccctagacattagtcaatatccaatttggcaaacaacagaaaaataagttaaaagcagtaagtccagaagataattttttcttctagcgcttactgctttttgttaatcttttttagtttattaatcttcagaagcttccattgcttctaaaataatccgtaactgactgcattcttcccgtaaagattgcatctcttcaccgtattttggttgaatagtaacagtctgagtgcccgtattttcctgtccctcttgtttacataaatcatccaaacgggactgtgcacggtataaatcttcttcaatttcatgtttgttactcatatttaacactccccaataaatgtgaaatatttttagagcaatactggaattgcaatataagtaagataacacgaggatagaagaatgttaaccctttttaggttacatctttgttactatctaatgaaaaagctctaataatctatcagaactatttaaccgttccggcaaaacttggattaaagtatggactgattgtgtaagtcgaaacattagtccctgggtgagcagcggccacatattgattatttcctgtgtaaatagctgtatggtaagttgaaccatggttaccccagaataagagatcgcctggcttagcttcactaactggatgttggtccacacagttttcaagtgctcctgtatagtgtggtaattgcttaccttccgcattagcataaacatacttaactaatccagaacaatccattccactaagactttcaccaccccatacgtatggaacactattagagttagcaatcttagtggcaagactaactacagaaccatgttgtaaatcttgattagtagttgctgcttgctgtgcaggttgactagcagccgcttgtgattgttgcggttgagcttgtgacgttacaacagttgtttgttgcgaagcagcattactattctgaacgttatccgtcgcttgtgatgctggtgcagtctgtgattgtgaagcttgacttgctactggtgctgcttgaacaaatgattgtccatataaagcagcagtattcacagctgttgaagtagcttgactaacagcaaaactttgtgtttgcggtgcaacactattttcagctgaggcagaagcaacctgaacattattagctgtagcaggttgagcagcaactgttgtaatggctggactattagtagttgctgaggacgttacagcagcagaagtcgaagttgtactattcgcaatagtggtactactattgttggctgcactttggttaggagcagctactgttgaagaagttgaaacttgttgcgttgcactcaaagcaggagttgcttgtgaagttcctgctggttggctactagccacatcttgttgaggcacagaagcagaggcaactgctgaagtttgaacctggatcaatgaagttgtgtccgtcgattgagcagccggttgctgagccgatacactcgcatcagcaacaggggtacttacaacgggcgcgtttacagcagttgagatcgcaggacctgttacactgagttgttgtccaatgtataatgaatcattagagcttaagttattccatgacattaattgactaacagttacattataacgatctgcaatagagctaagcgtgtcgccaggcttaacagtataactaccatcagtattcaaatccgcgttagcatcatgttgagtagtaggcaacgttaattgttgaccaactgtaattaagtcgatgctatcacttatcttcttaactgaaggatttgtttgttctaatgcactaatagaaagtccatgttgttttgcaagcccccaaatagtgtcaccagacttaacagtaagctgttcagcattaactgcttgtgttgtcactgctaataaacttaaggcactaactgctcctgcaaaaacgccacgagatcgatggttatttgaatgatgtgttctttttttactcatataaataaaacaccctcccaataagttcctaaaaactaaacaaacaataataaattagtgaaatacacaattctaactttaccattaatttttaaatgcgtatagcaattattagatagttcttaaaaaacgttactctttcttaaaagattaatcattataataatatttaatctatcatttcattttttacacgatccatacgagttactaataacaattcaataattgtaataatactcattaatagaactgagtaacgactagtcgtcatgaaaacaataattgctagtatacacaagatccaattcaaccgtttttcttgacgaactacccgaataaaatcctttgtaactttatctggtcgttgacttgccaagaatccaagttgactatgtaaacgattttcccaaatcactaatcctaaaaaggcaattgaaataataaacgttattagactattcatcattatcctcgctatcatcggcatgcaccgtcttattatttgcttgtgattcattgtatcgagcggataaaatctgctgatatttttccatgattactttattgatcggtgtatcatttagggttggatatttttcttttattttttccaaaacatcatctgaaaagtcataaacagtcttaacttccttttcaccattaagaaatgccaacgtctcatcatagtccagagttattaaatcgcgctgtgtacggtcagcatctggctggtggaggacatctggatcatcttttaaatcttcacgaaagccgttttcatcatattgatatttattatcttccatttttaaattctccttggttatcttccaattcattatacggtctttataagactaagccaagccagtaatttgctgtaaaatgtgcgtagaaaacagtcttctcgacaaggcggttggctaagctaaggcggaggtatgggctaattgtcgctcggacgcgagccttgtgacaacgcgaagctaattctacgttatcttgcaattgttcgtgaaaatagcagagggtgagaaaaaagcaaagttttttccaccctcttttaattcctaattattaacatgactcactttaattaaacgcgcaacgttttctgctgtttgcgcaatatcaataggtgcatctgctaatgctgcttttaatggtttagccccttcaggagttgcaaaaattgcatcgatggccgtggatgaatatagatcatttacacctttaccaatatttccagccaacacaattactggagcattaggagccacctctttagttgccttagcgactccatatggcgttttaccaaatttagtctggaaatcaattcctccttcaccagtaaaaacataatcagcgccaactgcctttttttgtagttgagttgcttcaatcactaattctactcctcgcttcattgtcgcaccggtaaatgctattaatccggctcctaaaccaccggctgcccctgcacctgccgtttgttcaacgtctggcccaccagctgcaactatttttcgtgcataatgatgaagatttttgtccaagatgttcaccatttcgtcatcagctcctttttgcgggccaaatactggggcggccccattttttcctgttaatgggttggtaacgtctgatgcaatctgaatatctacattttttaagcgaggatctaagtctccaaaatctatttgctctaaacttgctaactcaccaccgcctaaaccaatttcatgattatcagcatccagtaaacgtgctccaagtgcttgggccattcccgccccgccatcaacggttgcacttccaccaattccaataattattttttttatgttatggtcaagagcatccttaattaactcgccggtaccatatgtagttgtaataagcgggttcgcagtctccttattaacaaattgaaggccacttgccgctgccatttcaatcactgctgtttccccatcacctaatattccgtactcagcattaactaatttatttaatgggttgtggactttagcaatcatttttcgaccgttagtcgcatcaactaaggattgaacagttccttctcctccatcagccattggaactaaaacatactcggcattcggaaacactcttttaattccttctgccatcacatttgctgcttcttttgctgttagtccgcctttaaatgaatctggagcaattacaaatttcatcactgatcatcctttcatttatagtaaatgcaaaaagccatacaagatagttgcggttaacattgcggaacctccaactaagaattcataaaaaataccttgcgatcgttctttaatatccatatgcattgcattcgctgtaacatggaaatagtttccttgaggtaattggtcaatgacaatcgccccagtatgaaccattgcagccgctgcaagtggtgcaacaccaaatcctaaaatagacttggcaaaagaaccagtagctaaaataacacccgtagaggttgaagcagttgctccggccatgagaataccagaaagtggtgctaataagacaccaggcacatgacttgccttaataagttcgattaataactctgggaaagtagacgcagtaatagtagcaccaattgcacctgcaccaattaaaatcattactacgccagtcattcgactaacaccggtctgagcataactcttaattttttcaccttttcccattgctagagcacctattattgctgcaaatggcaaaacataggtagcatctaaatttacttttgctaataatggtaaatgacaaatagttccaattggtcctaataaaagtaaaactattgcaataacaggagcaacgatggcttgtttaaatgtcggcaaatcactttgcttgattgtttttgcactatcttcaagatcttgttctagaactgccctaccttttttgcggatcattctagctacaacaactgtaactattaaagcgatgacggcaggaataaaatcagcaatcattacttgacttagttcaagcccaaaaccctttgctgctgcaattgtatttgcatttggtgagattatgttacctgccttgcctccaccagataaggcaaccaataaagataattttgaaatatgcatattgcgaccaacttcaagggcaattggtgcaacaattaaaacagcgactgggataaagacacccacagctgtaattaccatcgttgctagagctaatgcaaaaatagctaaccgatcaccaaatttattaacgattgtccgtgcaagggtttcggcagccccagaatccatcataacaccagctaacattcctgctgctaatactcgaaggaccgttcccattacactttgttcacctttaaccaaaatattaatagttccttctaaaccagccccaccaataacggcgccgactattgcacctagtaataatgaatatactggatctaattttcgtaaaattaaaaaaatcgcaagtgctaatcctattaatgctccccaccaagaaatcattttataagcctcctctttgattgctagtaaagaaatattaaaataagataaaatatcacaagaaacagtatccctttgtcatcgtttacattaatccttaaacaagcttataacaagttatgttttgcacaaagattattatgcattttgtacacaaatcctattatcaaaatcttatcgtctaattaccaatcagtaaggagaaaataatggaactcaaaccagaacttgcacaatcaattgtcgatcatatgatgacgcaaataccgtataacattaatattatgaataagaaaggttatattattgcaagtggaaataaaagcaggataaatactttacatgttggagctgttgatgcgataaaacagcgaaaaacactaccaatggagcaacaatatggaaatcatggacagccaggcgttaatatgcccttaaaatttaaaaatgaaattattggtgttgttggaattactggtgaccctaataaagttactcccctagcatcattgctaaaaacagcagtcgagctcttgctacagcaaaaacaagaaaatgaacaagagcacgaaattgaaaaagttaaacaaagatttatttataggtggattaatgtcagcaagtatcaaaatccgcaacttgatagtgaactagttgaggaagcaaatcgtctaaatataaatctagcaaaacaacgacttgtaattgcaattgctgggagttctcagataatcaaaaaccttaaactagatcaggaaacaattattttttctcttactaatcacattgagttgattatcctcagttcaaagcaccaagaaacatatattcaacaaaaacttgaacatcaagaaattgaatacggtatcagtaattggggtaatttgcttggtagattagcggagcaagcagttacaacactgcgattaagtaatatttttggaaagccatcatttaggcattactcacaagtctcttttattaaacaggtattagatagtgatttaaatttaatagcagttaatgatcaatatgaagctttactaaaaagaaaagatgggaaagaattgatcgatacaatccgtgagttcattaagtgtaatatgagtgtaaatcaaactgcgcataatttatttgtacaccgtaatacacttaataaccgattacttcgcattaaaaaactttttgaactagatcctaaaaatactgaagacttatttcaactttttattggctacattactttttactatcgacaaactttataaccatacaaaaaatactccctatattcagagagtattttttattatgattataaaattttaaactaacccatttgcgactaaacgttctgcattttcaacggtattccaagccgcccctttaaggagattatcagcaacaacccacatattaaaggaaccaggattttcttcatctgcacggagacgaccaacaaaagtgtcacgcttgccaacagcattaattggttgaggataaacctggtgcgcaggatcatcctgcagaactaccccgggagcgtcctttaatactgcccgcaattggtcaacagttaccgttggatcatcaacagtaaagtaaatcgattctccatgagcaattgggacaggtacacgaacacaagtggcagtaaccttaatatccttagcgtccatgtcgtttaacatgatcttctttgtttcgtggatcatcttccattcttcatgggagtaaccatcatcttcaaagacatcgatctggggtaataaattaaaagctaatggataatgcttcttgtcaccctttgttggcaaaatcttggcatctgcttgcatatctttaccatcaaggtagtcttgagtttcttgtcgtaattcatttaaggctgattggcctgctcctgaagctgcttggtaagtcgaaacaataatttgatttaatccaaatgcttggcggattggttccaatgctaccaccatttgaattgtcgaacagttagggttagcaatgattccgtgatgattttttaacgcctcttcatttacttctggaactactagcggtacatcaggttccattcgaaaagcactcgtattatcaacacaaactgctccccgttttactgcttctggaaggaacttttttgatactgatccaccagcagatgaaagcacaatatcaaccccattaaaagaatcaggtgtcgtttcttcaacagtgatcggttggcctttaaatgataattgtttaccagctgacttagcagatgccagtaatttcacactctttactggaattgttgattgttccaattgctgaatcatccgtgtaccaactgcaccagtagcacccaaaattgcgacattatattctttactcatcttagttccttctttcaacctatcctaaattattcataaaattttgtaaccgttcaatcgccgtatcaataacagaatctgccgctgcatatgataagcgaatgtatccttctccaccaggaccaaatgcatttccaggaattacgccaactttagcttcgtgggctagtttacgagcaaaagcgagatcatccttcccaaattgcgcagggattttagcaaaaatataaaatgcgccatctggcaacgcaatttcaaagcccatctttctcattgcactcgcaagtttatctctccgttgacgataggcccgcttaaattcttgcggatcatcattcccgttttctaacgcttcaatcgcggccgcttgagcagtatcatttgggcacgttaccataaatgaatgcatctttgacatcgttgaaataaattctcctgggccagccacatatcctaaacgataacccgtcattgcatgtgattttgataaaccactaatcagaattgtctgctcgggcaaaagtgtcgcaagtgaatggaagggttgatcgtacatcaatgaactataaatctcatcaacaatcgcatagatatgatgatcttcaattactttagccaatgcttttaactcttcttcagtgtacgaacggccagttggattattaggataatttaggagaacagcctttactgccggaccctcttttgctaatacctcttctagtctttcagcggataacaagaagccatcttcagcagtgttaactttgatcggttcagcaccagttagagaaacactcgggaaatatagcgaaaatgctggagtgggaataattactttatctcccggatttaacattgcaaaagttgtcgcggttaccgcttctgttgccccaatcgttactacaatttcggtttcagggtcatagtaaacgtgacgactctgctcaagatatttactaatcgctttgcgtaattcaatcttacccttgctcgacgaatagtgagaatcatcattttgaatactttcaattgctgccttcttaacatgatctggcacagcaaagtccggttccccaagcgttaattttactagtccaggaacggcagaaatttcttcatcaaatgcgcgaatctgtgctggcggaacagctgccagatgactatttacggttgttgctaattcagcatggagtcttggcattttttcaccctcttataaaatattttctaagccaattaccaattttgataatccatcaactttctccagagcaaccttaaccccattcataaaggattgacggtcaaatgagtcttggcggatagttagggcctcgccatccccaccaaagagaacttgttcgtgagcaatgtaccccggaagtcgaacagcatgaatcttaattccatggtagtcgccaccccgcgcaccggttaagctctctgtctcatcaggattcgtctcatgtgcaggacggacttgatcgatcaactttgcggtactcaaagccgttcccgatggggcatcttttttatcaccatgatgcatttcaataatttcaacgtccgggaaatatttagctgcttcctgagcaaatttcataagaagaactgccgacatcccaaaattagcagcgatcaatccacccacttgtttttcttcactgaggcgcaccaggtctgcttgttgttcatcggttaagccggtcgttccaacaatcggcctcattccgtgttcaagcgcaaacttaacattctgataaacagcacttggcaaggtgaaatcaatccaaatatcagcaacgccatcttcaatttcatccaaagtttgataaggatgaacagatgatgcaaggtgaaaatcagccatattctcttttgttaaggttggtgcaagcgcagcagtaatttcaaacccagcgagtgagttcactagatcaaccgccttttgtcccattgctccagtcgcaccagcaattaaaacttttttcatgctttattcccccaaatttaaaggtaagttcttggcagtcaacgaattagtaggtaatgataaggcagtctctaattcgcgtttttcttcttcatttaatggaagaattggtaagcgacaactaccaacgttaaaaccttgcgcattcaaaacagctttaactggtgatggtgatgggaacataaacaaagcggccatccggggagttaaccaccgttgcaacttaccagcagtttgataatcgcctcggtatagtgagtcatacatttggcgcatttgatcgacataggtatgggaagcaaccgagataaccccatttgctcctaaaacccgggcagttagcgcctgtgcatcttcacccgtgaaaactgcaaaatcagggtcgcggtgttcaacaatgtattcaagttcttccaaagatgtacattgttttacagcggcgatattttgatggtgcgacaattctactacggtttcctgagccatctttacccctgtacgaccaggaatgttgtaaatgatgattgggaggtcaacattatccgcaactgctgtgaaatgagcaaccattccccgttggttaggtttgttataaggaggaacaacaacaagggcataatcgataccgttaatttgcgcaacctcattagtaaaggcaatcgtttccttagtattattgctaccagttccagcaataaccggaacccgtccgtttacaatttcaccgaaatgttggtatagctcaattttttcatcatgagtgagttctggagtttccccagtagtcccccgataacaaaaccattactcccatgttcaattaagtaatttgtcaaatattctaaacgaccatagtcaatatttccctcatcatcaaaaggggttacaattgccgtcattaagtctgcattttgtaataatgtcatattatttcctccattatttgttccctattaattttgcatccgatattcaagaaaaccagtaatcgcatctactccacgtttaattgctttttcattgggggtaagggtggccgaatgtaattgtgaatcatcttcaaccccaagccaaaacatggttcccggaaatttagccagtaagtagccaaagtcttccccagtcattgctggttctgtttcgataaagtttacagttggtgtttcttccatataatggataaaccgttttgttaattctggattattttctactggccaatagccaccctgatttaattcaagggaaacatccatgttaaaactacgcccgattccttcacatacgtccttcaagcggtcatcaatagtttcaatcatcgtctgcgttagtccccgaatcgttccttcaatccgtgtatgtccagcgataacatttcgaatcgtcccgccgtcaatctttcctaaagtaattacaccactttgaataggatcgatactccgcgaaatcacagtctgcacttgaagaattaatgaggctgccgcaacgaccgtatcattagcattttgaggatacgccgcgtgaccgcccttaccattgaggtcaatattaacttccgtggttcccgcaaacaaggtccccatccgacaaccaattgctcctgctggcaaatcaggattatcatgcaaaccgtaaaactcatctggtttccactttccgctaaacaagcccagttcatatgcccgctttccaccattttcgctttcttcggccggttggaagaaaaacaggatattatcttgcggctggtgttcactaaaataattcaatacccctaatgcaaccgtcatatgaatatcatgaccacaggcgtgcattattcccggatgagttgatgaatatggcaagcctgtttgttcctcaactggtaaagcatcaatgtctgttcgatatccaattgttcgttgtggattctgaccatgaactaacaccatgagagcagttggcaattccttaaaagtacgaacttctaaaaatgcttggttaaaactagcaaccgtctccactaagtattggtgggtgtcaaattcatggagagctagttccggaatttggtggagatgacgacgaatttgaattaattcttcttctgttaacatcttcatcctcctaaagcttccgtaaatcgtcctctaattcagtcttaccagcagtttggtcatcaacattcttaataaacttagcaggaactcccgcaaccatcgtatgaggagcaacatcatgagtaaccacggcgccagcagcaatgaccgctccttctcctacatgaaccccttcaattaccaccgcattggcgccaatcattacattgtcatcaatgcggactggttcagctgaagccggttcaaccactccagctaatacagtaccagcaccaatatgacagtggcgaccaacaattgcacggccaccaagaactgcccccatatcaatcatcgaatcggcaccaatttcagcaccaatattaattgttgcgcccatcataatgacagcattgtcaccaataagcactttatcgcgaataattgctcctggctcaatgcgggcattaatatccttcaaatcaagcaaagggactgctgaattacgcgcatcgttttccacatggtaagattcaattgctgaactgtattcctttaataacggttcaataactgtccaatcaccgaaaataacacccgtacgctgttcaagaaatgtttctacttctgtgggaaattctaaatcacccaaattccctttaagatagacctttaccggtgtcttcttgggtgcgttactaatgtagttaatgattgtttgtgcatctaattcagccataattatttacctctttcttcctttatatatgtcaaattattgttggtatggttcatccaaatgaattaaatcatcataggtttctcgtttaattacaacctgagctgtgcctttttctgcaaagacaactgctggacgaggattccgattataatttgaagccattgaataaccataagcaccagtatcaagcatcgctaagacatctcctggttttgtagccggtaatacctgattctgactgaggatatcaccagactcgcaatactttcctgctacccgaacatgttcaaccaactctgcacgaggattatttgctaagaccgtttcatattgtgcttcataaagtgctggacgaatgttatcacccatcccccatcaactgttacatatggcttcaaccctggtacatctttacgtgatccaacagtataaagattataaccagcgggccccgcgattgaacgtccgggttctatccagatcgctggcatagcaagatttgtttctttaatttcagctttaattaccttaataattgctgccacaaattcttctggagcaagtggtgtatcatcttttacataacgaattccaaaaccgcccccaacattgatcacagcagcttgatagttaaatttttcttgccagtgggcagcaacttcaaccaacttcttagctaccccttcaaatcccgcaagctcaaaaatctgtgaaccaatatgggcatgcaaccctttcatttgcatccggggattctcgaggacttttgctaacgcctcatctgcctgtcctgattgaaggtcaaacccaaacttactgtcaacctgaccagtttgaatgtacttatttgtatgagcagaaattccaggagtaattcgcaacattacatcaacatgtgcatcaagcttctccaaaacgtctgctagcaattcaatctcatggaagttatcaatcatgattgttcccacgtgatggtcaattgccatttccaattcttcccgtgatttattgtttccgtgaaaactaacatcagccattggaaagccggctttgattgccgtatataattcaccaccagaaacaacatcaacatgcgcaccttctgcagcaactacttgatacattgcgattgctgaaaaagctttactagcatagctaaccgcataatcaacattattttcttcaaaaacccgcttaaatgctcgaatctgttggcgaatctgttgaacatcataaacaactaacggggtaccaaaccgatgagctaagtcaaccgcatcacatcccccaatcgttagatgaccagcggcatttaattgttgatcagtaatctgttcgttcatttgtaattcctccatgagatttgtagtaaagaggctataaaaaatccactgtctgcgcaaacaaacagtggaattcacttatccattctgatttgtcgatagcgcaacgcaggctcttattgtcctgcgacagtccgtagcttattcaactacgacccagctacttaatgtgccaaactaagcgcttcggcaacttccctgttcaactaacctcaatgtcttggcggactaaattagtttactagtgtcggttgcgcctcttcgatttatacatagcttataagtcttttatgagaatgtcaatacaaataattaaatttaaaaagtttttttaatccattagatgtaagaaagtttattttacttaccttatacaacttaaaggtttgcatgtcttccttaatgtgttagaattcgattaaattattttagagataaattaacaaccctaattttctcaaaggagtatttaagtatgaaagttgtaaaatttggtggaagttctctggctaatggagaagcctttcaaaatgcaattaatattattacctctgacccccaacgccgggtaattgtcacttctgcgccgggtaaacgttttgccgatgatattaaagttactgacttactgattaaatatgcccaagcagtaattgcaggccaaaatccccaagaaatcgttgaacaaattttaaatcgatatcaagagattgccgcttattttggcttaccagcagataaattaattccgctagttgaacgactggaaggtcttcctaaccatacgtatccaaatgataactatctcttggccgctttcaaagctcatggtgaacgcttaaacgctcaactaatggctatccttttgcagcatttaggctatgaagcacgttttgtgacaccaagtgaagctggtattatcgttactggaacacccaataatgctaacgttattccagaaacatatgcaaacttgagtcattttacgtttaatgagaacgaattattagtattccctggtttctatggcctaactcttgctggacacattgctactttttcccgtggtggttctgatatcaccggtgcaattctcgcgcgcggtcttcacgcttcaacttatgaaaatttcaccgatgtcgatgctatttactcagccaatccacaaattgtcgaccatccgcaaccaattacaaccatgacttaccgggaaatgcgagaactatcttatgctggtttctccgtctttcacgatgaagcattgattcctgctattcaaggaaatattccaattaatgttcgtaatactaatgatcctgaaaagccgggaacaatgattgtccctgataaagattttcaaccaagcgatattataacgggggtcgtgagtggaaaacactttgcagccctctacctgcacaaatatcttcttaacaagcaagcaggttttactcttcggatccttgaaattctcgcaaagcacaacgtctcatacgaacatatgccttccggaatcgatgatataacaattatccttgatcggaatgcaattaatgaccaattaatcgataccatctgcaatgaaattcaagaggagattaatcctgaccgtttagaatggattgataattatgcaattaccatggttgttggtgaaggtatgcgtaatcgcacgggggtaattgatgatatattaatgcctctagccgaaaaacacattgcggttcccatgattaatcaaggagcttcacgaattgcaattatgatcggaacatacaacgaagacgcggatgatgccgttcgagctatttaccatcgctttttcgcaaattaggaggaactatttatggtgcaattattaaaagtacacggatcacaaaatgccttttttattcttgaccaaacacaattgactactccccttaccgataaagaactagtttcatttacccgaaaagtaactgatacacaaaatggcgttctcggtggtgctgatggcgttttagttgttaaccatccaactagaccaggatcggtagcacaaatgcgggtaattaacgcagatggcagcgaagcctcaatgtgcggtaatggtttgagaacggttgctcgttatgtagcagaacgtgataatttaaccgattttaaagttgatacaatgaatgctagtcttcgtgttcgtcagcatgaagaccttgcacctggagttcctgcttttgcggttgaaatttcaccagtaaagtttgaccgcactgctttgccatttgataatcttggccatgagcgcctgttagacaccctcgtccctgagttatatcctaacctccgtttttcagcccttgctgttcctaacccccacttaattagttttgttagtatggaagagctaaatggcccagcacttgaagaattaggtacacggttaaatagtgataatctttacttcagtgacggggtaaatgttaattttggccatattctcggtcataacaaactctttgtaaaaacgtttgaacgaggagtcggctttacaaatgcttgtgggacaggtatgtctgccactagtctcgctttagccctcactcatccagacgcagcatcatttaatgaaccaattagtgtttataatcctggtggcatggttaagacaattcttcaccgtgatgactacaactactgggtcgaactaatcggtaatgctacgtttactcatattattactgtagaggagtcaacaattcaccaagaaaatcttgatgagcttcaaagcagtagcgttgaaatggatgaaaacaaagcatatttggcttttgttaattcactaccttccttaaaatttgaaaactaaaaaaatttaaaagataaaaatcgatgaaaattcagtttcaactctgaattttcatcgatttttaatttatttacgattaaacaatgtatcaattgattggttattgtggatacgaacaattgcttcttttaataaatcgtccactgataattgaaccaacttagggaattctttctcttttggtagatggattgtatctgttacaatcattttttcaagaggagaattttgtaacgtatttaccgcatcagctgataatactgcatgcgtagcaattccgtaaactttagcggcaccaaagttctttaatgcttgtgcagataagttcatccgtactcctgtatctacaatatcatcaacaataatcgcagtctttccttttacatccccgattacatattccggtacttcttgttcagtccgttcccgaacttcattgttacggttatcaataatcgcaatggaagctttaattcgttcagcatatttccgcgctaaattaacgccagcatgatcaggggcaactactacaatatcatcacccaagttttgttcctcaatatatttagtaaaaagactggttgcttgaagatgatcaacaggaatatcaaagaaaccttgaacttgaggagcatgaaggtcaatcgttactagtcgactaatttgatccatttcaagaaggttggcgatcaatttagctgtaattggttcacggcttcgtgcttttcgatcttgacgtgcatagccatagtatggcattactacgttaatcttggccgcacttgcccgccgtagagcatcaaccataattaatagttccatcaagttagtgttaactggatcagaaactgactggatgacgtagacctcacagccacgaatactttcgtcaattgtaattttaatttccccatcagcaaaatgactaatggaagctttactcaacggaatccccacgcgttgagcaatttgttcagctagttttggatttgaatttagtgaaaataaacgcacattatcggcattttttatctgggtcatttttatactcctttaaagttcgacaataatcataactattatgacaacaaattactattcaagcaagtattatttggcttgatgcaaactttgtaagctaatattttccattccgattaatggatcaattgtctctgaattaatgagatcagctgttaggatatattgctgagcatcattatttattaactgttcattttctttttgaacaggttgcggactagaaagttctttggttaacgaatccgtttgatgatccaattttgattttagttcaccatgcttactccaaaccttatcaagacgatcgaccaaagaagttttccggttaactgcttcattttttacactagtcacaaccgcatacggctcaccgatcaagactaacttttctgcggcacgggtaatcgccgtatataaaagatttcgttgaagcatccggctaaactgctgaacaatcggcaaaagaaccatcttaaactgacttccctgtgctttatggatcgaaatacaataagctaaccgtaattgattccattccatgcggctatagctcacttcattaccatcaaaatcgacagtaattgattcatttttcttaccgactgtcctaccgctttcaattgctgtgatttttccaatatcaccattaaaaatgttcttttctggaacattaacgagttgcagaaccttatctccaacacgaaaagttagtcccctaaaatcgacttcttgctttccattagctggaggattatatgcctgttgtgcaagttcattcaaacggtcgattcccgcctgtccgcggtacattggtgccaagatttgaatatcatttgcggaataatctcgttttttagaaaggtcaataatttgttgaaccacacttggcacttggttagcatggcatgagataaatgatcgatctggcattttattcgttagatctgatggtaacttaccctctttgatagcatgagctaatgggataattgttgaatcagcagcctggcggtgaatattggttagttcaactttgggcagttctgcaaagtcaagaagatcatggaaaatttgcccgggaccaacagatggtaattggtctttatcacctaccaaaaccacatgcatagaagtagggacggcttgaataagagtcttaaacaagagggtatcgaccatcgacatttcatcaataatcaataacgagccttctaaatcgcgggcattcatatcagttggcatttcccgaccgttaagtcctagcaagcgatggattgtacttgctggcaaatctgtagcttcactcattcgtttagcagctcggcctgtaggagcagctagcaaaacaggaaaagacttttccttatattcatttacatccaatgagagattatgaattttcgcatagctagctacaattcccttaataattgttgtttttcccgttcctgggcctcccgtaagaagcatgactttgctgtttaaggctgttttaatagcctctttttgaacttggtcataggttatccccgattgatcagcaacttccgtaactgttttttcaatagtcgttgctggtaatttttcctggtcaacggtaagaagacgatgtaagtgatcagcaatttgccattccgcgttataaagggcagttggataaattttttcatccgcgtaactaatttcttgatttttctctaactcaacaatttggttggcaattaaatctgtagaaacacggccaccacttccttgggcaagcaattggatagtttgctgcagaagaggttttgttgtagtaaatgtatcaccagtttccattgtcaagtcatcaagtgtctggataattgctgcatcaatccggcgtgaatcatccgtggcaattcctaatttttgtgccacctgatcagcacgattaaaactaattccatctatttcagcggcgagttgataggggttttcattaataatatgtagagtttcttccccgtacttgtcaaaaattgcactactaaggttagcgccaaagccgagatcatttaggccgataataatctcgtccatcccctggtttgcccgtaaattatcaaccaatgaatccttaactgctttgcggagttttaatttatctaaaacatgcgggtcagcaataattttattaatcgcatctgttcctaacttgtcgacaattttttcagccgtcttttttccaattccggtaaattgttttccagacaagaaatcaactaacccatccttgcttgtaggacggttgacatgataagaagtagcttgaaattgttgtccatatcgtggatgctcaacaatttttccctcaaagcggtaagtctgatcatcactaagatcaccaaaacttccggttacagtaatttccggctcgtgccaatcaaaatttgcttcttcaaccgagacaattaaaactttaaaaaacgaatctggactagtaaaaatctcagattgtacctgaccaataaaaaaagacggctccgttggcgtcttaaataggtcgatttcttcagccatagaagtcatcctttcatgttgctaatttttcttttgcgttgcctgaagcgctttttcaatatcattaagtcgttgctcactcttatggtagtagttaggatctaactgcttagcttgcgcaaggtagtctttgtatggttcaccaagaaccatcgctacaattccgcggttaaattgcgtatcagcacggcccggatgatactttagaattgcatcataataagccttagcctgtttaaattcacctaatgctaataatgaatcaccaattacctgattaatttcaggatcgtctggacgtaattcaagggcagttaatccataagcaacggcttgcttgtattgtccctttttcatatagctttgggctaacataagataagaatcagctttgagtttgggatcatcaatcttattgtaaagcttaattgcttcattaactttgccaatctcatagtaaaggttaccaagaccatagtttaagaggttcatagcatccttgtcaccctttgcctcaaagatccccaaagccttcataaagagttcttctgcttgttgatagtcatttaaccgggttagcaaagaacctaaatcataataattgtttactttatctgggtgctcatcaattgcttcaactagtttatgaactaatttttctgtttcctttttcttaggatcacgaaaaccttttttctctgtcattaatatcacctcttaaatcgtatcagtcggatcaaccttgctcttgtgaaggtaagatgtatcattccacttttcaagttcaaaatgacgaccatcattagtaataagaatcgtcgttgatgtattgcttagtccaccacgatctttcaagtgagcaagcggtgttccaatcaatgcattaatggcagcattcaaggcagctccatgtgaaatcacgagaatattaccattaggatactggcgacaatactcttcaattgctgcacggaaacgagcgattacttctagaaaactttctccttctactaatgattcatcatatttatcaggatgatgacgaaagttttttaagacttcaggccattttgccgcaacatcttcaaaatgcattccctccattttgcctaaattaaattcttttaaccggctatcaattgttaatgggatttctggattcaaatggttcaataatgcctgagctgttacgcgcgcacgctttaaaggactagtataagcgtgttcaaacggaatcctttgtaaagaacttgctaataattcaatttcacgataactatcctttaataacggtgaatcgccattggcaccttgataacgggattctaaattccattgcgtttttccgtgccggattaaataaacttttgtcatctctgtcgttaccccttttatttactatcttaccagagtttgcggcaattgtttatcacagagttattactttatgtatatttaagaaggcaaaagcgaaattacctctgccttctttaaggtctaaaaatatgaatcaaacgtattgaagctgccggtcatgactgtaagcacgatcaataatcgcgctcccaaggcattcctctccatcgtaaaagacaaccgcttgacctggagtgatggcccgtgcaggatcatcaaattcaactgttaccatttgatcatcctctgacaaatgaacagtaacgccaacatctgtctgacggtaacggaacttggccgtacaatgaaaatcacgcccataacgacttacaacatcatcaacccagtggatatcactcgcttcaagatgagtagcataaagatagctgttttcgtatccttgaccaacataaagaacgttcttcttcatatccttaccgattacaaaccatggctcattactttccttattaccaccaaggccaagcccacgacgctgaccaatggtgtaatacattaagcccatatgctgaccaacgaccttaccatcaagggtctccatattccctggttgtgctggaatatattgactcaagaattcacgaaaatgaccatcctcaccgataaagcaaattccaacagaatccttcttatcagcagtagcaagccctgcttcttcagcaatctttctgatttctggcttagtgtagccagctaatggaaacattaccttatccaactgcttataatcaagttgacttaagaagtaagtttgatccttgtgttggtctttagcacgcatcaagtgcatccggccgttctcatcacgctttacatcagcatagtgtccagtagcaacgtaatcagcacctaattggttagcatattcaataaaagccttgaacttgatctctttattacaaataacatcaggatttggtgtacgacctttcttgtactcagcaatgaaatacttgaaaacccgatcccagtattccttctcaaagttaacagaatagtatggaatcccaatcttagaagcaacttttgctacatctttgtagtcttcagtggcagtacaaacaccattttcatcagtgtcatcccagtttttcatgaagacaccaacaacatcgtatccttgaagtttcaagagaagagccgtcactgaagagtcgactcctccactcattcctaccaccacacgtgtatgactattatcagccattaattatcaccatcatttcgtatagattctggaataatctacgattgaaggtcgcatgcatccagtgataaccattgtaccagagtatttcaatccctgcacagtttttatttagtgaatatttgccgggcaaccatttcatctaaaatatagtgatattgttgaataaattcagctgcgcgttggtgattaaaaatattaatttttcttaaaccatttcctgaaagagtctccattttaaaaccgtctaaatcactgttaattaaaatccgaagacgggcaaccggtttaaatgggttatcagtatcgagacttcctaaatattcaaagtttccccggttagtctgttcaaatcccaaatcaagtaaagcatattttttatctctgggctaattgtgtatttatccttatcaccagaaatttgtactgtttttgtaaattccattttaattgtccccattaattttctttaggttttcaacggttctaacaatcgtagcaattaactgatcaatatcttcttccgtatttaacccaccaaaactaattcgaattgattcactaattcgggggctatcagcgccaaacatcgctgttaaaacgtgagaaggttcaatactacccgctgtacatgcagaaccaccagagactgcgatgcctgcaaggtctaggtctgtctggataacataagttgaaattcccttaaaccataagttaagcacgtgggttttgttgatttgtccattaatttcaaaatcaacattattttccttaagcgcattaacgatcttttgcttaaaggcataataacgatcacggcgttcttcttttacctccggcgtgtttaattctaccgctttagcaaaaccggcaattccaggtacattttcagtccccgcacggcgtttagtttcttggtccccacccttaataaagcttggaaaactaatgccatcacgacgatataaaaatcccatcatctttggcccattaatcttatgggccgatgttgaaagcatatcaatatgatcagctttaacatcaattggcaacagtccatatgcttgaactgcatctgtatggaaccatgcttgatggtctttcaaaatttcaccaatctcatggataggcatttgactacccacttcattgttttccatcataatggttactaaaatcgtatcatcacgaagagcggccttaaaatcatcaattgagatattaccattttcatcaactggcaaataggttacctcaaagccatgttcttctaaaaaatggagaggttttaagactgcctcatgctcaatggcagttgtaataatatgcttaccaagattctgccgtttaaaagcagtttggataatagcagtattatcactttcagtcccccactggtaaagataatctcattatcatcagcattaatgctttgggcaagaacgtgacgactatcttccattacaagtttggcatgacgcccataagagtaaccagttgaggcatttccccatgattcttgcatttgtttagtcacttccgcaatcacttctggggtcattggggttgttgctgcattatccaaataaatctcactcacgagtttttcatccttccatttacttatctaaatctgcaaagagctgaagaagcatgtttgcagagcgttttccggcatcaataataaagtcgtcaaaactaacgccggcatcttcatcacctgtatcagacattgcccgaactaccacatatggaatttggtggtcagtggcaacttgtccaaccgctgccccttccatttcactagaaagtgcatcagggaaattattcaaaatctttttaattgcttctgagcttgcaataaattggtcaccagaaacaattaatcctcgttttacatttaaaccagtcttttcgccggctttttctaaggcttgtccccattgatcagaagccttaaagcgcggttctttccctgggagttgaccataacggtaattaaatgcagttgcatcgacatcatggtaggccgtttcagttgaaattacaatgtccccaacatgtaagccttcaccaatcccgccagctgatccagaattaatcacaacatctgcctcacaatcggtaattaaatgttcagtagtaatcccagcttccactttaccaattccagattctactaatacaacgtcttgattactgatcttaccgaaaaggtaggatttacccccgatttccttttcttgtttatcagataacttcgcagttaattctttaatttcttcaggcattgcacaaataattccaaatcgcatatttttctcctttttatccaacataaaatagtattaagtaaacaataataattgccacaatcaaagcaatgattgcaatatttaagcgacgcttcaagcgcgctgttttttctgccactgtttcgtcatgacgctgactagcaactgcttcgcgactataaggtcgatcagttgtattttctgccgcttcattaggttgttcagtctgacgttgctgttgacgatattgactacgtgacatacgtgattgttgctcatcttgttgtttattatccacggttgttcattccttgccagtaatagattgccatgattgtcttagcatcttcaatttcgccttgatcaatcatttcaagcgcttgtggtaaagttacttcttttaacatcaattgttcatcttgatcttgcggcagctcgttgctaacccgttttaatcccgtggccaaataaagagtcatgtattcatccatacaaccaacagaagtataaaatgaagaaatcttttttaaacttgttgcttcataccttgtttcttcatttaattcacgtttagccgcatgaagagcattatcagcatcccgttggtcgagcttccccgcaggaatttcaagggttgttttcgcaattggtgcgcgccactgtttttcaagaatcattttattatcagccgtcaaagccaaaatcgcaattgctggtgcatggtggacgatttctcgttgtgttttattaccatgtggggtgataacttgctgtacttcaacatcgattaaatggccgtgaaaaactgttttactacttattggtcgctcttcaaattccattagaacccatccttatcttaaaacacgaacatgtgctgcttgtggtcccttttgtccttgaacaattactaatgagacctcttcatcagggtgaaggatacgacgacgcgttccttcaattccactataatgaacaaaaatttctccttcgtgaggaactgtaataaagccccatcctttttgttcgtcaaaactttttacttttcctttgagcatttttaccaactccataataaaataccaagcaacaagtgtcacttggtattttacaccgcttaaaaataattgtcatttactggataacgaaaaccagtttttttagagattattcttctaaaccatcttctgctgtttcagggaaattttcccgaacaatcgcagcacagcgagcacataattcaggatatgctggatcactgccaacatcttccttaaccatgcgacaacgagcacaagtttcaccattagcagttgtaaccttaactgctaccccatcgttgtattggtcagcatcagcaggcgcttcatcagctggatggacatgaagagcagaaacccctagcaataattgaatgttttcattaagactatcaagtaattgcttttgatcatcggttaagtaaagatcaacttgagcttcaagtgatttaccgattagcttagcattccgtgcctcttcaagactcttcagaacatgtgaacgtacttccataaagtcatcccacttgctcaatagctcttcttcgccagcgaatgtccgtggatctggaatttcagttaattgaacaaaatcttctggttcattcatgtagctccatacttcttctgtagtatgagggagaattggcgtaagaagtttaacaagtgtcaaaaggatatcgtagaagacggtttgcattgaccgccgaacttctgaattttcagcctcaatatagagcacatctttggcagtgttcatgtagaaagctgaaaggtcattgtttacaaagttgatcaatgccttataagcatcaaggaaatcataattatcaaaatcttcccgcattgtctttaagaagtggttaagtttaaccaacatgtacttgtctaccgattgtaacttctcataagaaacggtattttcttcaggattgaagtcactagtattagcaagtaagaagcggaacgtatttctcaacttacgatatgcttcagaaatctgttggaatgttcccatcgatacacgaacatcagctgaagtatcagcactcattacccataaccggataatttccgcacccatttgttgaacaaccttatttggatcgataacgttaccttgagatttactcatcttgttaccgcgcttatcaagtgtgaacccttgagaaacgatttccttatatggcgcatgtcctgaacatacaacactggtaatcaaactagagttaaaccaaccacggtattggtcagacccttcaaggtaaaggtccgctgggtatgttaaataatcacgttcagctaataccccttggtgtgatgaaccagaatcaaaccatacgtccataatgtcagtttccttagtgaacttaccattaggagaatgttcattagtgtatccttctggcaaaagatcttttgcttcacgttcaaaccaaacattagaaccatacttagcaaataattctgctacatggttgattgtttcttcttccatgattggtgtgccatcttcagcatagaagattggtagaggtacaccccaaacacgttgacgagaaattacccaatcaccacggtctttgatcatattgcgaagacgaacctttccccattctgggtggtacttaacgtcttctaaggcgtccaaaatactttgacgcatcttttcaattgatacaaaccattgatcagttgcccggaagatgattggttgctttgtccgccaatcaaatgggtaactgtgttgtaatggctcttgaagaagtaaagcattgttttcttctagcttttgaagagatacatcatcagcatcttggtagaataccccttcaaagccttcaccgttttccttagttaaaacaccttgatcattgattggggcaaaaattggcaagtcatactttttaccaaagttgtaatcatcatccccatatccaggagcagtgtgaacaaggccagtaccagcatcagcagtaacataatctgctaaaccaacaagaagatcacgatcaaggtatgggtgttgagtagtcatcccttcaagttcttgacccattaaatgatcaacaacttcataatcttcccacccaagtttttctgctaatttctcaagcaggtctgttgcaacaacaaatttccggtcatcatttgctggctttacaacagagtaatcaaactttggattaaccgcaactgcctcagaagcaggaacagtccatggtgttgtcgtccatacaactaaatatgtatcattatctaaacggcctttgccatctttaatttgctctacgaagaaggctgttttagcaacaacatcatgatattcaacttcggcttctgctaaggctgattctgaagaccatgaccagtaaactggcttcttagcttggtataatagacctttcttagcaaattcaccgaatacccgaatttgagcagcttcaaattctttatcaagggtaaggtatggatgatcccattcaccacttacacctaaccgcttaaagtcagtccgttgcttatcaacttgcttaagggcatattcccgacaaagatcacggaattcagttaagctcatcttcttacggtcgtaaccggacttagtcaattggtgttcaattggcaatccgtgagtatcccaaccaggaacataaggtgcccggtagccagacattgacttatagcgcacaataaaatctttagaaatcttgttcatagcgtggccaatgtgaatattaccattagcatatggaggcccatcatgtaaaacaaaagtaggctttccttcatttagtttttgtcgtagttcataaactttattttcttcccatagctgttcccgttgtgcctcagttacaggtaactttccgcgcattggaaatttagtacggccaaggtttaacgtatctttaacacgcattgtaactacccctttcattaattcttgtattttaataataaaaaagcttcctcccattactgggacgaagcttcttcgcggtaccacccggatttaaaactttaagattaaagtttcctcatgtcattagataacgataatgaaccgcctcatcctaactaactcaaatgaggtactccgagatgatcaggaatagttaaacattatcaacctctcaccaattgttgactcgcttcaacgttatgataattattccaattctcttcaacgattttattaaaatacgattctagtgatttacttgttattatcagggaagacaacaacagtttcaggtgcatctgatcctttgtcatcgttaacagctgttggttgtacaggtgtactctcttcttctgtttgttcagcagaagcaactggctgttctgattcaacaggttgttcttcactagcagttgttgcagttgattctacactggttggtgaactgctgtcaagacgactacctaaaattttttcaatttcgtcatatttactcaagtcatcattttccaaaagcttgtcccattcattactcttaatgacttctaattgagattcaagcatgacttgaagccgttgacggaagatccgagtctgtttacgaagatcattagtttcacttgttaacttcttagtagaattagcagcgtcttcaattacttgatttgacttatcattagcttccgaaacaatatcggttgcttgcttttgcgcttcacgaatcataatatctgcttcacgcttagcattatttttaaccttatcagcggcctcttgagcaactaaaattgacttatttaaagaatctttcaagtcagcaaagtacttaatcttgctatcgttagcccgtacttgctcttgtaaattattattttcagttattaattgttggaccgtttgtgaaacttcctgaataaattcttgaacttctttaggattataaccccgcatcttagtattaaattgcttattgttaatttgatcaaccgtcaaactcatgagtaaattcctccattcaaattacgcatttacaactgaaatggtaattctttctttgtctttttttgttttcccattggtcatatcgattctgaggcgaccaccatgacgcacagatatcaaatcatgaaccacaatttgataatctggacaatcaatctcttcccagtttaatcgaacttgaccatgctctattaattgctttgcccggtttcgtgaataattaaagcctgcagctatcacaacatctaaccgtagtgatgaaactgttgtaactatcggtacccattcctctttaggtgttaccactgcttctgttgcgatcggaatccatttaaccttaattcggccaacgtgctcaacgtttttccgtaaatactctgccattggtttcgttacgatcacttgccaatgcgctccatcagttaaaatatcaccaaatgcattccgctccatcccttcaccgattaatgttcccataatttgccgatggtgaagttctgaaaacttaacaggatagtttatctctaaagcctgtaaagtaaagtcttcgatagagggttcataataaggcggataaattaaaactcgttgcatttctgcgccttgccaaccaccatacattgttattttaacattgttatttcgattaacaatcgtttggataataaaacgttcacgtggatttaaaaaaggagtgaggacaggacgatattgaccttctgcagtggctacccagtcatttgcttggtcaataagggtggcttcatccggacgaaaatgttgtttaatattatcttcgctcaaatttacttcctcttagtattaattaaatgattgctgctatatgtgctaatcctgcctgaacaaaatatagtacaaggatagcgatcatcggcgcaaaacttatcccccgattggaggaataaaatcaaaccaatgcatataaggttttaccaaccgattgataacatcaccgagtcgtgaattacgtgcatttggaaaccatgacataatgcaccacacaactatcactaagatataagcatcaactaattgattaagagcccataataaaaatgcgatcatattaactccttttagtgattaaaatttatcaccatcattttttagattactcgttaaactacctgagatttcatagtttttagggtgcagaggaaaatttcctttccgatccgtttcatttcaccatcaattgcaaaaacggtgccatttaagaagtctactaaccgtgctgcaacatttgtatccatttgagtgaaattaacgatcaccgcatgtccttctaataattgggatgcgatctgctttacatctgcataaagacggggttcgtataaggaaatctgactcattttgttaagacgcccgctattaattgaaactactttgttgcttgtgtttgctggcgttgaaacttgttcactcgtttcatagagaccatcttgttcatcaatgtcttcttcaccaaataggctttttaaaaaatttgctgccattgtattaccctccttaataggtctaaacagaaaaaggcggattaaaaaatccacctttttgctaaattatttacttacgacgattcttgaagaacggtggagtcgataagttagtatcatcattgtcatccgtattagccgcatcatcgttaaatacgttaaattctggcttagtaacgtgagaaaattcgttatcagaatttcttgattggttacttgtatcggctgttggatcattccaaccatcaaaaggatctcgttgctttggttgttcttcttgcggaataggccgagttactcgtggtgcttctttttccgctggcttttgttgttgaattttctttttcttatcaattccagtggcaattacagtaacgcgaacttcatcgcccattgattcatttaaggacataccaaatgaaatatcaacattagttccagcagcttgtttaatcacatctgatgcttcttgagcttcaaacattgataagtctttaccaccagtaatatccatcaagacatgttgagccccatcaattgacacttcaagtaatggagaagaaatagccttcttagttgcttcagtagcacggttttcaccagtagaagcaccaaccccattaaggcagaaccttgattagacatcaatgtcttaatatcagcaaagtcaaggttgatgtaacctggggtaacaattaagtctgaaataccttgtacaccttgacgaagaacattatcggcttctttaaatgcttccatcattggcgtcttcttatcaatcatctctaataaacggttattagcaacgataattaaagtatcaacatttgactttaacttttcaagtccttctgcagcatagcgtgctcgacgaggtccttcaaatgagaacggacgagtcacaacaccaacagttaatgctccactatccttagcaagcttagctacaactggggctgctccagtaccagttccaccacccattccggctgtaatgaagaccatatctgcgccttcaagagcttttttaatttgttcttcactttcttgggcagctttttcacctacttctggatttgaaccagcacctaatccctttgtcaatttaggtcctaagcggatcttagttgttgcttgagaattatttaatgcttgtaggtcggtgttagcaacaataaagtcaacaccttgtactttttcagtgatcattcggttgacggcattaccgccagctccaccaacaccaattactttgatttgcgcttccgcaaattggttgtcgttagcgaacgtttcgttatccatagcagtattcctccaaattagtcaaataaattattaaaaatgtttttaaaccgattacttaggccattttgctttttcttctttggcgctggctcttcagtaactggttgctgctgtgcttctcgctgtgaacgttgtaatttatcagatttttcagtccattgttgacgtggctgattaacaacttgtcttttttcttcatgaggactcttaatcgtatcaattcgttgaacagtttgcttaattaatcgatcaatatctgataactgattttcatacatccccaaagctaaactaaccgcatagcgagggtgacgaatgcccatttgttctggaacattcaccttaatattaccagtaaagtactgttcagcaagttccttaactcctggcagagcagccactccaccaatcaagactactcctcccggtaattcaggggcatgaatagccttaagtttatcctgaatacgatcaaaaatttgccttactcgtgcttcaattatttctgataaatactgctctgaatattggacaggatcattttgaccaacaacatcaacgtcaacttgaacatcttcatcggctaaggatgccatagcatatccatgatttagcttaagttgttcagcgttttttaatgatgtattcatgaccgtagaaatatctttagtaatgtatttcccaccctcaggatcaacataagtatactttaattgatgatcatgaataatactggtcgttgtttgaccaccacctaaatcaataacaacagtaccaaaatcttgctctccgtcattaaggaggttaaagtctgttgcgatcggcgtaataacaaaatctttaatgtcataacctgcctgttgaactgccttttttgtattatgaataatggtcttaggtcctgtatacaaggtggccttcatttctaaacggacaccaaccattccacgggggtccttaataccagaaaagccatcaacagtaaattctgttggaattaaatcaattatttcccgctcggggggaatactttgcgtcaacgcttcacgagcaacgtcaattacgtcttggttaacaatctctcttgattgtcctcttgttgcaatcgtaatcataccgtgtactcgttgcatttgtaagtaatttgccggtaagccaactacaacactttgaatctctacgttggacttttcctcggcctgtgctaccgccgccgaaattgcctgggcggttttatcaatgtcgacaataactcctcggtttaatcctgccgatcgttctacaccaacaccaataactttcaactgacccttaacactttcacacaccagtgccttgatcgaggtggttccaatatctaatccaacgtatacttctgaattattcattctaaaaggaaccctcctaagactatcattaattaaattaattgtattttaacctatataagaattttaccacagataaacaatgacaaaaaagggaattatcaaggtttttcacaaaatcatttatccttagatccatagtcataagaataagctccgacttgaagatctataattcccttatttttcatacttgctgcaattgcagggtaatatcccattttatccccgatagtatttaagtcgccataaactgtattaccatcacgcatataaataataacgcgatctggatactctttagtgggttgataactcacacttgaaataccatttcttattgccagtttcagctttcctaactgagcggccgttgtagcaagaacttttttatgaccatcaaaacgtttataagcaataccattatcagcattttttgttcgctgtaattggccgtcagctaaaacagcgtatgtatcattattcatcaccgctgttcctaaaagcgcattttcttttacagatatttgcagagactggggaccggttaccttgatccttaaatcttttatttgaggatttttgcgaatagcttgtttagtgagttgatgacgagcaagataaacgccccaaataaaccgtcctggataaatatttgcatttttttctacttgctcttttgttaagtcatgattacccgttacatgaagcgtggtaattttgcttaagggagaaataatataaagcataaagaggagaatagcactgaacaatacaactaattttaagactcgctcgccgttagaaacataacgcttaatcttaatcccgcgaatcttattaccaacatgcatttttggaggcttctttttctgttgtcgctgttgggcagcagcacttcgcctttctaattcagttaaccgctgtgaatatttatgatgctcaatcgcagatctatcatccaacatctctcctcctccttcctaggctatactttatttttcgtgttcatcaattgccttatgtaagatcttaattagtctatcagcggcatctggccgacccatcttttcagcagcatgcgccatctctttacgcacttcttcatcttccataatcttatctgcttgagtcaataatgcccgggcatctaacttatcttcagtaatcatcaagccagcgttattcttaactaaagcttgagcattctttacttgatggttagcggtaacatacggactaggaattaagattgtaggaactccgagtgccgttacctcagcaatagtggttgctcctgcgcgcgatactaaagctgccactcgaggcatcttagccggcatgtctttaatgtaaggaacgactttaacattatcagctggtctaatattattttctgcaagttgcttttttacatcatcataccgtttttgaccggttgcaaagataacctgataaggacgcttattgaattctggaatagcgtcgacaactgttttattaatttttggtgctccttgacttccccaaaaatcattaaggttggaatatcatctttcaagtcataacttgtccatgaaaagtcactatcttttttagcagctacctgttgagcacgaggattacctgccattgtaactttatcagcagggaactgactgcgtgcagcttcaaatgcaattgcaatttgatcaacataccgacttaaaaacttgtttgttacaccaacaacactattttgttcatgaattacggttgggatatgtttctttgcggcagcatataggacggctccacttacatatccacctgtacctaaaacaacgtcaggcttaaactcattaataatttttttagcatgatgaacagaacttaagaaaagatagattgtcttaaaattttcaagagaaagagaacgcttaaagccctgcatatgcattgtttcaagctcaattccggcatccggtacaattttattttcaaggccacgggttgttccaacatataacacttcagtatctggatcaacctgctttaagcgttcgattaatgctaatgctgggtaaatatgaccaccagttccaccacctgataccaataaccgcatcttattgttccttctttcctgttaatttttcaactgcttcaataaatttatcaccacgaacttcaaagctcgggaattggtcccaactagcattagcaggcgagaggagaatgacatctcctggttcactcagcttccatgcttctggtaccgcagtaattgcattttcactttcaattactggaactccagcttgattccccgcatccttcattttatctttacattcaccaaaaacaatcattgccttgacatgcttcttaaagtaaggaaccaaccgttcaaaggtataaccacgatcaaggccacccgccaaaagaactactggacgatcaaagccttgcaaggcaacttcagtagcttcaatatcagttgattttgaatcattgtagaaaagccgttcttggtattccatcacatattgtaagcggtgacggactccactaaatgttgttaaaactttctttattgcatcatttgtaacaccgcttaattttgccgctgcaattgctgccaatgcattttctacattttggggaccgatcaatcgaatatctttggttggcataacctcttgtccacgccagtaaatcattccatcttctacataagatccttcatgactcttattgagacgagaaaatggcacaatggtagcttgactacgctgagcaatcttttgccattcatcacgatcccagttaataactaagaaatcatccttggtttggttccgggtaatattaagctttgcattaatatagttttctcgtgtcttatgatagtctaaatgattagaaaaaatgttagtaataattgcaatatgcggatgaattgttggtgctcctaataattggaaactagataattccgtgaccaatgtatcgtctggccctaaatcctcagcaattttactaaaggaaattccaatattacctgcatatttcacttgatattttgcattttcagcaatcattagttgagttaaagtcgttgtggtagtcttcccattacttccagttacacttacaaggtgaccatcaaaaatttgccatcctagttctgcttccgtaataataggtgtcccctgcttaacgaatgcagccactaatggattatcataaggaattccaggattttttactacaatatcgaaaccttcattagctaatgaaatgggattatcaccagtaattaccttgattccatcagcttctaaatcatcaacaatatcattatttttaggagttgctttatcattagcggtaacattggcaccaagttttaccaataagtgagccgcattaatgccactaattccgaaacccattacaagaacttttttaccttgatattcatcaatttttttcatttctctttactcctaacctactaataagattgttgtaacggcaataattgcagcaactaaccctacaagccaaaacacaatatcaattttccattcactccatccgttcatttcaaaatggtggtggattggggtcatcttaaaaattcgtttaccggttgttttgaatgaagccacttgaagaatgacactagcagtttcacaaacataaacaattccaattactaataaggaccattcatgatgtaataacaatgaaacagcggctaaggatgccccaattgctaaagatcccatatcacccatgaaaatcttagcgggcttatgattataagggaagaaacctagtaaagttccgatcattgctaaacagaaaagagcaatttcaggataacctggttgattgagatttactaaagcaatgattagataagccgcaaaagaaataatggaaagaccacttaccaagccatcaagtccatcggttaaattaacagcatttgaaaagccgacgatccaaaaaataataaacaaaccgtaaagccaaccaatttgagttgttccaaagcccatttgaaaaccttcatgttggtaaataactgtaaagaccattgctgctaatacctgacatagcgccttttgccatggtttaaatccttcattttgatggtggaagattttaatactatcatcccacatcccaatcaggccataaacaaccaggacaaagaggagtgcccacagcgtattcgtaattaacccttgccaagcagcaacccataaaattgttactactgcagagaagatgaacaataatcctcccattgttggcgtcccagcctttttagcatgccaggtagggccttccttacgaatttgctgaccttcttttttagcccgaaaatatttaattaacgtgggcatcaataaaaacgtaattaagaatgaactaagaatagtcaaaactgcacttaagaaattcatatttacctccaattagtttctctgctagtttttagcttcatattgaacggttaaagttgttccacgcttaatagttgtatcaggtaaaatactttgctgagtaacatagccgtttccattttcttttacttttagcttaaggaccttagctaattgttgaacatccgcagaactccatccagaaatatctggcattttatactcgccaccagtatcaagaataacatgttgatctgttaacacttgttcgtctggaactgctgattgttgtttaactttcttgccagaacctacaacaattacctgcattcctttacctgataattctttattagcttcatcgcttgcttgaccaacaacattaggcattgtaataacctttttcttgaccttttctgcaactttttgttggctcaacaacattttcattgtcggattaaagacgctggcaatttgtttggttgctgtttttttaaggttttgcggttggcgaagggtgacatacataatatactttggatttttagctggtgccatccctgcaaaggagtaaaggtagtttgtatcaccagttgaataaccatgagcaccaccaatttgtgcagttgcggtctttccagcaattcggtaacccttaatttggtaatcatggccaaggcccttttgatcataaacaacgccttgcatgtaaccaaggacctttttcgctgtcgatgcttttattgggtgtccaacaactttaggcttaaccttttgaatcgtctttccgctattaccatctacaactttgctaacaatgtaaggcttcatcattttaccattattgccaatagcactaaacgcttgcatcatctgcatgacatttacagtaattccctgtccaaaagcggtatttgcctgagcaagaatccctttgaatgaagtataaccattaacctcgttactcattccgataacattaactttttttaacaggccaaatcgtttaatgtacttcatccatgtctctgctcccatgtcctgctctacatgagcaaacccaacattactagacatatcaaaagcatctttataggaaattgttccccaaccagaacttgaccaatcagtgatttttccgccacccatagcccatgttcccgaattaaaggtcgcattaggattaaaatgtccggtatcaatagcagcagctaatgacaaaattttcattaccgaacctggttcataagcatcttgaactaacatattccgccaaacaggattattttctgcatgaagagttggccgttgcgtagcggcaataattttacctgttttagcttccattacaactgcagtcattgcattggcgttagaacttttataaactttattaactttattttcgagaaaatgttgggtttgtgaatcaagggtagtgtagatattatctccattgacggcttttttagttacctgcttagaattagcaatttggtatccatagacgtcctgtttatcttttctcaacccgtttattcctgtcagttgtttattaaagtagccttctaagcccaattgtcccactaagttggtctcttcagttccattatcatttttaactttaggagttgccatcccaattatttgagaagcaaattcgccttctggatattgacgtgctggagtcgcaataaaattaattcctggcaagtgccggttcttgatcttctgcattgttgaaacagaaaggttgcttccagcatttccaaattcaacttggtaggcttgcccttttggtttaagaatcttttcaatttgctttggggtcaggtcaatatactgtgataataccttggcagttttttttcgatcttttacatataacggtttaccatcagaagacttttgggttcgatccaaaaccgcatagagggtatatttacttgtatcagttgccaagggattcccttctgaatcataaatatcaccccgtcgcgcttgaataattcgctgctgggtataaatttgttccgcttgtgaccgtaagttaacatgttgaacatccttatttattgcgatatacgcaaaacgaacgataaataaggtaaacaatccaaccgtgattagaaagagccatttgccaaaggtccctcggttttctctatgtcccctatttttcgttcgttgtggcttcttattcattatttattaacgttccttacatttgaatttttatctgataatccatatttatgtgctgctgatttcaaatgcgattgagtcgtcaattcagcgatttcttgctgcaaacttgtattactactttttgccttagtaatttgagtttgggtatcctgtaagcgccgttgctgattattaatactaatttttgtagaaagtaagctaatcattaagcatagcgtaattaagctacctactgctactaaagatctttcaaattttgaccatctaaccggacttggagaaatttttagttgttgataagtcttttttcttggcgcttgctgcggttgttgctctcccgccagttgccttgccgcatttgaaaccataattctgtcactttccttctctaattttctcgattatcctcaacttggcactatgcgcacgatgatttgccgctaattcttcctcactagctacaatcggctttttattaattaatttgaagtttggttccattcccgctggtattactggtaatccctgcggtacatccccacttaatgaagtcttttcacgaaacattgtctttactaaccgatcttctagggattggaaggtaataacacttattcgtcctccaacatccaacaagtctaatgcttgctctaacgattcctctaaagcacctaattcgtcgttaactgctatccgaatagcttgaaaactctttttcgctggatgaccaccatgacggcgagctgctgctggaattccctctttaatcacatcaactaattcaaatgtcgtctttattggtgctatctttcggcgttgttcaatctttctagcaattgacttggcaaatttttcttctccatatcggtaaagaatcttaacgagccgttcatatgaccattcgttaacaacttccattgccgacaatttttgttcctgattcatccgcatgtctaagggggcgtcatgctgatagctaaaacctcttttagcatcatcgaactgtggagatgaaacacctaaatcatataaaattccattaacatgttttacattatagctatccaattccgcttttaagttgcggaaattatcttcaattaatgttaatttttgttgctctattactgtttttaagtgttctttattgtaattaattgccgtctgatcttgatcaaatgaatataggtggccatcgacgagctgttgtaaaatagcttgcgtatgaccaccaccacctaatgttgcatcaacgtaggtacctgttggttgcacatttaatcctgctacggcctcctttaaaagtaccgttacatgtttaaattctgccatcaactaaaacctccattaaaaatcaatattaagatcttcagcaatctcatcaaaattatcagctgtttcgcttgtaaatttattccaccgttcagcgctccagatttctaagcgattagacacaccaacgattacacatttcttttcaagtgaagcatgagttcgtaatgttatcggaatattaatccgtccttgtttatcaatttcgcaatctgtcgcagcggaatataaaaagcgtacaaatgcacgtgcatcacgctttgttaatgggagcgcctttagcttttgttctaaaatcgcccattcatttaatggatatccaaacaaacatccatctaacccccgagtaacaatgaagtgtgcccccaattgttctcgaaatttggcaggaataattagtcggcctttggaatcaatagtgtgtgtaaattctcccattaacacgactaatgtcctcctttaccacgttataggtcaagtctaccacaatcccccacttctcaccacgtaattttgtgaattttaccaaaaagtaatagacaaaaaaagtgagcagaaaattaattttccaactcactcaatatttttatatcaacggtaaccatggtgaaataattaagctaccaatatatataattaaagcataatatgccgaataccgccaaaatactggccagtaacggcgataaatgaattcatgattgtgaataatttgtaaagcaattaatagcagagctagaatcatccataaggcaataggataagctggccaatagaatccaatattaaagattatcagaatccataaaataattgtccatccccaccataaatgctttgtttttttaggatgatgaaatattcgtactaataatcgttctactatcccaatcactaataataaaataatctctaaaattataacttgaatactaaccatcaaccttttcagtccccttctctttaaataagtaatttaagtttaacataatctaaaactagatttgaaaaaggcattaaagatgcgttacactactattattgataaaaatggaaggatggttaataatgcagcgaaaaaagaaaactcgtttccaaaaaattaccatggttgctatttggctcatgttaattgcaatgcttggttctttaatctttggagcagttgcatccttaaacttaatttagcctattaaacatccatgtaatcggaataaaaaaagatcggagaaaaatttctccggtcttttttattcctcacttttttgcttataaacttcccgtggttttgagccattagctggtccgataaaaccgcgttgttccatatcatcaataattcttgctgcacgattataaccaattctaaatcgccgctgaattagcgaagttgatgctttttgttgatcaaccacaaaatctaatgcttcagggaataattcatcttcctcttcagcttgctcttcttgctcaatttcatcgtcagttacaaccatattatcgtcatactcagctactcgctcgttttttataaagtctactactgattcaacatcatgatcagaaataaatgcaccttgaatccggactggcttattttgatcaattggttcaaataacatatcacctcgaccaaggagcttttctgccccattagtatcgataatagttcgcgaatcaaccccactagaaaccgcaaaggcaattcgagaaggaacgttagccttaataagccctgtaataacatcgacagaaggacgctgagttgccaaaatcatatgaataccagcagcccgccccatttgtgcaatccggacaattgcatcttcaacatcatgagaaacagtcatcattaagtcggctaattcatcaacaataactaaaattaatggtaggttagcttgaacttcatcaggatggtcatcattttgttgtttgaccaacttattatatccatccaagttacgaacaccgaattttgcaaacaattcataacgacgctccatttctgcaacaacttttcctaatgcccgagctgcttttttgggttcagaaactaccggactgagtagatggggaataccattataaacactcaattcgacttttttagggtcaatcattaacatctttacctgatgcggtttagcctttaataaaatgcttgtaatgataacattgattgcaacagacttaccactaccagttgccccagcgataagaaggtgtggcatcttagttagatcagccattttgatatccccagtgacactgcgaccaagcggaacttccatgggattatcattactaggagcattttcgaccatatcgcgaaaaccaactgttgcaatttgctggttcggaacttcaatcccaattaatgatttccctgggatcggcgcttcaatccggatatctttagccgcaagtgcaagtgccaaatcatcagccaaatgggttattcgactaacctttactcctactgctgggcgtaactcatatttggtaacggaaggacctaaattaacattttcaactgttgcatccacaccaaaagattttagagtttgttggagcgttttggtgttctttttgatattattcaaatcttcctgctgatctgttgcttttacttgacttagcaggctgactggcggcaattgataatcattgtcttctttagcgtcaattcctgcaagtttaatttccgcatcatcacgttggttcgagtcctgatcatccttacgtccactctgagtttcttccacctgactttcacctgcgaccctaatagttggttcaacaggatcttgagcaggcatcgctggagaaactggcggcgttgacgttggctctgctgattcttggtcagcaaaaaaatctttaacctgccttgatgctttagcaaggggcacgctaatcgatggtaccgtagttgtcttggttgctctctccgttctctttttcattaattgatcgtgagcattagccatggctgctccagattttttaatgccaatcccacattttactagaaattcgcgccatggtaatgcaaaaaagacaataattccgataatcattaacaaccatgacaataccgctgttccaacttctgaaattaaaatattacttccattatataggtaagcaccaatcatccctccaccaaccggaacagttgaatcaccgttaaaaatgaccttactaagactattccaagtagttttgattacctttgcatgaagattcagacgctgaaacattactgtctgaagccacattaataaaccaatataggcaataatagttcctgcaatccaacgttttttgaaatgcggacgatgcccatacaatgcaaaacataatccataaagaaaaacaataatcattgcaattggaaaggatgaccctacaaaaatcttaaaacagttatcgagaaaggttcctaatgctcctaaattaaataagccaactaacattaagaggcaaacaattattcctaatagattatccattaatcgatactgttgttttttccctcttgtccggcgggatgatgccttttttcttctcgccatcgcattattgcctccttaaggttactttaatttatcgaattcatatttatgaacgcgggctaaattaggaaaactctgttgccgcaatacctcataaataacaatcgctgcactattcgataaattcagggcccgaatattattatcattttgtggaatccggatagcattttctggatatttttgcataaaacgttcgggcaagccagttgtttcttttccaaataggaaataatgatctccttcacccgtataatcaacatcactataatcatgagtggcaaacttagaaacaatatataaacggttaatatcaggaatagtcttcataaatgaaggtaaatcctcatgatacgtgatctttactttatcccagtagtctaatccagcccgtttcatatgcttatcatcagttgaaaatcctaatggcttaattaaatgtaattcagtatttgttcccgcacaagttcgtgcaatatttcctgtatttgctggaaacaatggttcaaacaagacaatatggtttgtcataataaaatctccttaataaaataaaaaaagcagggtctcggtgtgggcacggcgaaacgctgctttaatgaagtactccttgataattaccaacgaaacacttatattcgatgtcaattatcaaacgatttcctataataatttagcactaatttagtaatgttgcaataattaattagcttttttcgcaattaataagctgacatccaccgtaattgtttttaattgggttaattcttctttagataatcttttagcgtttgctccccagtgtaaaggcgtcatttccagcattgcctgttgtaaaccgtctggaattctaaattggtaggttaccgtttcaactttactatgaggataatgccggttaaataactcgattactcgtgaattatcatagtggtaattacgttctcctgtttcatataagaggtgacgtaattcgactaagtagttagcgttaggaattaccttaataagggtcccatcttttgttagaacccgtttaaactcttgataataagatggagaaaacaactctaatatacaatcaaaactctcatcattaaaaggtaatttacgtaaatcagctacacaaaaaaatgcctttaacggtaactgagtagcaagcgttatccctggtttcgaaatatcaaagccaatcatcgtatcattacagttagcacggattgtttctaattgtaataatggtgttccttccccagttcctacatctaagatccttaaagattttgaaggtaagaatttactgatattttcaataattggcttaaatagtcctgcatttaatagctgacgacgagattcaaacattgagcaatcatattcagtattagccgctccattaagaaagtgaagataaccatgccgattaaagtcaaatcggtggttatttccgcaaataatactatttccttcaactctatccattggctgttcacaaacagggcattgaaaaagggcaagattattttttaccatttctcgttgacgttcaacttttttcaacttttttcctccattaacaactaaaaattactaataacagtgtatcacagctagaattacgatgggcaaattgctattatataggtaagcattttcaaaaaggaggaaattgccttgattgaacaatttctaattggaacttatactaaaaaaacaagtaaagggatctacaaagttaccctcgatactgaccaagaaaaaataacgaacgttgaattagcaattccatctcaaaaaccagcttacttacaagttggtcaagatggtcgtatttacgcaatcaaacaagtagatgacaaggggggcgttgcttcttactcattaaatgacgataacgctaagatgctaagcgatgtcttagctgccggtgctcctcctgcatatgtaggcgttgataacaaacggcatttattattcagtgctaattatcatacagcaaaaatagatgtttttaagatcaacgaagatggaacgttaacacaaactgattctgtccttcatgaaggagcaactggtcctgaacctgaacaagaggctccacatgttcattatgccgatctaactcctgataatcgtctagttgtatgtgacttaggaatggatcttgttgtggtttacgatgtctctgatgatggtaaattaactgctgtttctcgctataagtgtgaagatggctttggtacccgtcatatagttttccatccaaatggcaattatgcttatcttttgggtgaactaagcagtaaactagaagtactcaagtataatagtaaggatgcatcatttaagcaccttcaaacgctcaaaacaattcctgaagactggacagctcacaatggagcagctgctatccggatttcaaatgatgggaaatttgtctatacatcaaatcgtggtgaaaacactattgccgtctttgaagttcaaccagattttaccgttaaacatatccaatctatttcaactgaaggagattttccacgtgatttcaatctaaatcaagatgaaaattatcttttagcttcaaatcagaactctgataaccttactctttataaacgaaatccatcaactggtaagttaactctccttcaaaaagatgttagttgtccagaaccagtgtgtgtaatgaagtggaaataaattaatatcaacagcgtgaactggaccctgtcaagtagacaataaattatacaaagtttcttaggcagcttgatgccggtattgtaccggtgttaagctgcctaatttttcgtaagcagtccgtatccacacgtctagccatcaaaaacttagtctcctatactaaaagcaatcttagtacaggaggctttttctatggaaggaaaacacgatattgtagcaccaatttttaagaccaagaattcagtagttaataaggaagaatttattcctcgacccaccgcaaaactacaagctgataacattgaattaacgatctttaagggagctaatcccagtcttgcgactgatatagctaaagtggttattcgttatgctcattaattggcaggcaccggagcatgtttaccttgtttgtggtaagacagacctccgtaaaggaattgacggtttagcgatggtagttgcggaaaactttggattggatttatataataattcgctctttttattttgtggtagtcgcaatgatcggttcaaagccctttattgggatgatgaaggtttcattctgctatataaaagatatgaaaatggtagtttaagatggcctaagaacaaaagtgaagttaaagaactaaagccagagcaactaaatgccttatttacaggtctatccccatttcccgagcgacatattcatacaattaaaccaggaaatctatactaagctctttttaaactgttttagctctgatataataacaaaagtttattagattggaggtgacgtacaatggctgagtcattaaagaaagaaaacgaagcactacgtgcgcagttgaagaaagctcaagaacaacttgaacaacaagcaattacgattaagcaactacaggaaataatttttggaaaaaaactgaagttttagagcaggtagctgatggacaattatcactgtttgatccagttgatgatctgaacttggatcaagagattactgaagcagttaaaacaacaacgactaagatcgtacgtcatcgaccagcgaagaaacagctaactcgtcaagagtttttagaccaacttcctcaagtcgaggaagttgtttctttaaaaacgaccacctgtccagattgtcagcacgaaatggctcacattggaaagaggttggcacgacgggaagctagactaaaagagcctgaattgtattgtgccaacttatatgaggaaagctataagtgtaaacactgtagtcaagatggaaatgataaattggtaactagtaaggcaccaatggctttattaccacatagttacttttcaagcagtattatggcatttatcgcctatttaaaatttaatctggcgttgcctttccatcggcaagaaagctttgtacaagggttgggattacctgttagcgccaagcaaatggcctcgaatattattaaagttagtcaaacgtacttagagccgttgtatcagtatttaagcaatacagttagacaagaaccagtcattcatatggatgaaacaccttttaaagtcgttgatagtcctaaatcccaagactatttctgggtaacgcggacaacgaaagagtttgcccaacatccggttgtagtctttcatcatgccaatacgcgttctggtagaatcattggacaaatagtcggtaataattatccgggtattatcatgtgcgatgggtataaagggtatagtaatcaactctatccgcaagcaaaatttggttcgtgcttagtgcatattcgacgagaatttgtcaaattggtcaaagcactgccaaaaacaatgaaggcgtccaaagcgcaacaagcaataactcttcttagtcaggttttccattcggaaaaccagttgagttatcaaacggccaatgagaagttagtgcagcggcaaatccatgtcaaaccgctaatggataaattttacaattacattagccagattagccagccgattggacagttgcgtaaggcaattcagaacgccatccagttaaaatcacgagtgtatcgtgtatttgaaaatggacaattaccgttaagcaacaattcagttgagcaaagtattcggccatcaacactaattcgaaagaattgtctattcgcaaaaaccgaagaaggtgccaagacgaacgccgtctactatagcttagtagagacagctaaactaaaccagcttaacgtccagcggtacttagaatacttgtttgatcacctaccagagagcaattgtcaagatctggcagcttttttgccgtggtcaaaaaacgtacaaaaagaatgttgcgaatagaaaatccccgtgaagccatcaaggacggttctacggggattttttgtctgtcaataacgtgtcaatatggactgcttacactgcttacctttcaactcatagttaatatccatgctgggcgtactaaaaaaggacatgcactgtattaaacaatgcatgtccttttactatagcgtggcaacgtcctatcctcgcagggagcgatcccccaactactttcggcgtgttgaagcttaacttctgtgttcggcatgggaacaggtgtatccttcaagccatcatcaccacactctttgtcccttcggacgagagcttgtgctctcaaaactaaatcctatctattctcttccaataaaccttaccgctccttggttaagtcctcgaccgattagtaatggtccgcttcatgcctcacggcacttccacttccatcctatctacctcatcatctctgaggggtcttactttcccgaaggaaatgggaaatctcatctcgaggcgagtttcacacttagatgctttcagcgtttatctcgtccatacatagctacccagcggtgctcctggcggaacaactggtacaccagcggtatgtccatcccggtcctctcgtactaaggacaggtcctctcaaatttcctacgcccgcgacggatagggaccgaactgtctcacgacgttctgaacccagctcgcgtaccgctttaatgggcgaacagcccaacccttgggaccgactacagccccaggatgcgatgagccgacatcgaggtgccaaacctccccgtcgatgtggactcttgggggagataagcctgttatccccagggtagcttttatccgttgagcgatggcccttccatacggaaccaccggatcactaagcccgactttcgtccctgctcgacctgtctgtctcgcagtcaagctcgcttgtgcctttacactctgcgcatgatttccaaccatactgagcgaacctttgggcgcctctgttaccttttaggaggcgaccgccccagtcaaactgcccacctgacactgtctcccagcacgttcagtgctgcgggttagagtggtcatattgcaagggtagtatcccaccagcgcctctgtcgaaactagcgtcccgacttctacggctcctacctatcctgtacaagcagtacaaacactcaatatcaagctacagtaaagctccatggggtctttccgtcctgtcgcgggtaccctgcatcttcacagggatttcaatttcaccgagtctctcgttgagacagcgcccagatcgttacgcctttcgtgcgggtcggaacttacccgacaaggaatttcgctaccttaggaccgttatagttacggccgccgtttactggggcttcaattctgagcttcgccgaagctaacccatccttttaaccttccagcaccgggcaggcgtcagcccctatacttcatcttacgattttgcagaaacctgtgtttttgataaacagtcgcctgggcctattcactgcggctggccttgcggccagcaccccttctcccgaagttacggggtcattttgccgagttccttaacgagagttctctcgctcaccttaggattctctcctcgactacctgtgtcggtttgcggtacgggcagttaactactccttagaagcttttctcggcagtgtgacatcggcaacttcgctactttaatttcgctccccatcacagcttgtcaacacggatgtaaacatttgactcacatcctgacttactgcttggccgtactcttccagtcgtacggtttgcttagcctcctgcgttcctccatcgtcaaacgcagttaactggtacaggaatctcaacctgttatccatcgcctacgcctctcggcctcggcttaggtcccgacttaccctgggaggacgagccttccccaggaaaccttagtcattcggtggacaggattctcacctgtctttcgctactcataccggcattctcacttctaagcgctccaccagtcctcacggtctgacttcgccgcccttagaacgctctcctatcacgtgcacatagtgcacatccacagtttcggtaatatgcttagccccggtacattttcggcgcaggatcactcgactagtgagctattacgcactctttaaatggtggctgcttctaagccaacatcctagttgtctatgcaactccacatccttttccacttagcatatatttagggaccttaactggtgatctgggctgttcccctttcgacggtggatcttatcactcatcgtctgactcctgagtataaatcaatggcattcggagtttatctgaagttggtaacccatgacgggccccttgtccaaacagtagctctacctccacgattctttacctcaaggctccccctaaagagatttcggagagaaccagctatctccaagttcgtttggaatttcaccgctacccacacctcatcccagccattttcaactgacacgggttcggtcctccagtgcgctttaccgcaccttcaacctggacatgggtaggtcacctggtttcgggtctacaactacatactttttacgcccatttaagactcgctttcgctacggctccggttttccaccttaaccttgcatgcaatcgtaactcgccggttcattctgcaagaggcacgccgtcacccattaacgggctccgacagcttgtaggcacatggtttcaggaactatttcactccccttccggggtgcttttcacctttccctcacggtactggttcactatcggtcactagggagtatttagccttgcgagatggtcctcgcggattccgacggggtttcacgtgtcccgccgtactcaggatcctgaacagagagtgtgacgtttcatctacggggctttcaccctctatggcacagcttcccaactgttgcgactacgtcgcactttggtaactctaatgttcagtcctacaaccccaacaagcaagcttgttggtttgggctcttcccttttcgctcgccgctactcagggaatcgatgtttctttctcttcctgcagctactaagatgtttcagttcactgcgtctacctcttgctagctatgtattcactagtcaagtaatcagcgactaagctgattgggttgccccattcggaaatctccggatcaaagcgtacttaccgctccccgaagcatatcggtgttagtcccgtccttcatcggctcctagtaccaaggcattcaccatgcgcccttcataacttaacctaaacaatcaaagattgtctgattaattgagttagcgattataattcgttaattaaaactcaaataacgcggtgttctcggtttattgttttgttaataaagaaattagatagtatttagttttcaaagtacaaactctatcaaccttatggttgataatggagaataacggaatcgaaccgatgacctcctgcttgcaaagcaggtgctctcccagctgagctaattccccatatgggcctaaatggacttgaaccatcgacctcacgcttatcaggcgtgcgctctaaaccagctgagctataggcccaaataagcgtcttataggttaaagttttaagaggtaaacctctcaaaactaaacaaagtttctccgatgtgtaggttccgttttattccttagaaaggaggtgatccagccgcaggttctcctacggctaccttgttacgacttcaccccagtcatctgtcccgccttaggcggctccctccataaaggttaggccaccgactttgggcgttacaaactcccatggtgtgacgggcggtgtgtacaaggcccgggaacgtattcaccgcggcatgctgatccgcgattactagcgattccgacttcgtgtaggcgagttgcagcctacagtccgaactgagaacggctttaagagattagcttactctcgcgagtttgcgactcgttgtaccgtccattgtagcacgtgtgtagcccaggtcataaggggcatgatgatctgacgtcgtccccaccttcctccggtttgtcaccggcagtctcactagagtgcccaacttaatgctggcaactagtaacaagggttgcgctcgttgcgggacttaacccaacatctcacgacacgagctgacgacgaccatgcaccacctgtcattgcgtccccgaagggaacgccttatctctaaggttagcgcaagatgtcaagacctggtaaggttcttcgcgtagcttcgaattaaaccacatgctccaccgcttgtgcgggcccccgtcaattcctttgagtttcaaccttgcggtcgtactccccaggcggagtgcttaatgcgttagctccggcactgaagggcggaaaccctccaacacctagcactcatcgtttacggcatggactaccagggtatctaatcctgttcgctacccatgctttcgagcctcagcgtcagttgcagaccagacagccgccttcgccactggtgttcttccatatatctacgcattccaccgctacacatggagttccactgtcctcttctgcactcaagtcgcccggtttccgatgcacttcttcggttaagccgaaggctttcacatcagacctaagcaaccgcctgcgctcgctttacgcccaataaatccggataacgcttgccacctacgtattaccgcggctgctggcacgtagttagccgtgactttctggttggataccgtcactgcatgaacagttactctcacgcacgttcttctccaacaacagagctttacgagccgaaacccttcttcactcacgcggtgttgctccatcaggcttgcgcccattgtggaagattccctactgctgcctcccgtaggagtatggaccgtgtctcagttccattgtggccgatcagtctctcaactcggctatgcatcatcgccttggtaagccgttaccttaccaactagctaatgcaccgcaggtccatcccagagtgatagccaaagccatctttcaaacaaaagccatgtggcttttgttgttatgcggtattagcatctgtttccaaatgttatcccccgctctggggcaggttacctacgtgttactcacccgtccgccactcactggtgatccatcgtcaatccggtgcaagcaccatcaatcagttgggccagtgcgtacgacttgcatgtattaggcacaccgccggcgttcatcctgagccaggatcaaactctcatataaaacatacaagaacttgaatagctctaaattatctttgttattaagcgaattgacttcgcaaatgttttacttcaaatcacatcgtgaatgaagaccctacacatttgattcgtcgaaactttgttcagttttcaaaggtctacccgttggctaatcaagcagccaatcaacacgattattataacatacatcagatcagcttgtcaagaagaaaatttaattaattttgaattccttttgatcgataactcaatcagcaactttattaatatatcatgtcatcaagtggatgtcaatagtttttcagaaaatcatttcaagaattagtgactttacaaccatgtttactcttaataattttaatagatatgatcatttattcacatcttttcgatgacaatagttacattttaccctatatttttattatttgcaataccttttttataaaaattaccagtaagtaaattaattttatcttctggtaattttctactaattaattcaattactaatattcttttgcacttaaaagatcatctttagcgtttttgaaatcacttggcaatggtgccaaaacagtaatattttcacctttaaatggactataaaagctcagccaataacaatggagtgcttgtctagcaattaatcctgattcttcaccatacattttatcgccaattaatgggaaaccaaggctagcaaaatgaacgcgaatttggtgtgtccgccctgtatgcaacctaattttgataaggcttgcttgaacattacattcttggcgccagtattcagttacagatgctttcccttctttccctaccattctttttacaaatgaactgggatcgcgttgaatcggcgcatcaatataaccatgctctgcaggaacttttcctttaattagagcaagatagtttttcttaactaaatgtttttttaactgttcatctaggacagcatgggcaaatcggtgtttaggaaaaacaactaagccgctggtgtcacggtctaaacgtgtcgcaacatgggtaacctgattttcataattttggcgcttatagtagccttttacccgattcaccaaactatcggctaccggaacgttatgagccggaactgtcgctactcctgccggtttattcattattaaaaagtcttgatcttcataaataatatcgataggtgcctcactgatatccacattatcattagcagtttccggagggagaattaatgttactttatcgtggtaattaacagtatcaactgcccacttatctaccccatttatttgcatttttcctccatggtatatggctacttttaataacgaagaagaaaccccatacatttttaatgccgatcgtaatttccgtggtgtgcgatgatcatatatccaattaaattccattaatgcactccaccaataaatgaatcttttactcgattccagaaattattatgccgatattgagcaaaatatattcgttgcttagaaactctataagataattcagttaggtaccgctccttctcacttttaagcatccattgatcacgatcgcatgtaagcacatgcccattttcatcacgcaaacgcaaaattaactcagcatcagcgccaaaaataatcggtgagcctagtgtccggaaaacccggttgttaagtgaagccatttctgctaactgaaagccaacactatttggatcgacaatggcacccccgactgatttattataagcagttgaaccggttggagttgaaatacataaaccatcccccgaaagttttcaaacaaatgattattaatgaacacatcacataccattgttcgtgtaacattccgaattgttgattcattaagtgcaatataattctctatctgcccatcagaataagtagccttcatagcaagtagaggatacgaaactgcctgtccgctatcttttactaaactatcaactaaatcatcaatttcaaaactccgccaatccgtataaaatcctaagtgcccagtatgaattccaacaaagcgaatgttatttaagtctttttgataatgatgaaaagccgataacaaagtaccatctccaccgattgttattacaacttctggatttttttcgacataagttaaacccgcccgtttcatttcagcctttaaaacctttgtcactcgttgagattctgctgtttcattattatatattccaattctcataatttactcctttaactcgtcctcatcaatagaattagttgacctccgcttagaaaacaatgtctgtgcttcctttatttcttctcgaatctctgacatttcattatcaagcttaaatgctgcctctgcggctctttgcaaccttgcagatagctcctcaggaaactcaccttgatatttataatttaaggaatgttctactgttgcccaaaagttcattgcaagggtacgtacttgaatttcagctaatattcttttttctccagtaattaattgcaccggatattcaataacaatatgataggaacgatatccactcggtttaacattggtgacgtaatctcgttcttctaaaatagtcatatcacttcgctgccgtaataagtcaactaccttataaatatcttctacaaattgacacatgattcgtaaaccggcaatatcttgcatatcttgctcaagtcgatcctcttgcacatgtcgtctaatcattttttctttaatactatcaactggctttactcgtccagttacaaattcaatcggagaatgttgcgtttggtcttgaaattgctttcgcatcccccgtaatttgacttttagttcatttacggcttgttgatatggcaataaaaaatgctgccaatcttcaatcataattcagcctcctgttaaatctccgtatattttagcacatttataataataactcttgtaattatcttaaaacgtatctgtcaagttttcataggtagcctttaaatatacagttttagtgggttagtgccttaaaaagttgtcccattggtctacttgtggccgtgttaatcggaattattccttgtactgctccaattgacggctttgtcggtgcctttcttagaaactctccagttcgaatatgcatttcctgtaataggctggtttgagccactcgaggaagaactgttaattgttctaggattatatttaaactagcttgcagttcaccattcattcgggcttcaattaaaccaatcatggctttagccccctgcttagtccatgacttgccctgtttcttcatccggtaagtaaaagcccggtgagaactttcgactgaaccaattaaatgaatatccttaaatccacgcatttgtggtgagaggatataccgccaatttcgctgtagatactttcttaaacgcattaggtcatctgcttgtttttccgttaggttttgtgattcataagtatctaaaattattgttagctctgcttgatcatgatgacgaacggctttaattgctcgcatggctaattcgttgtgccggcctaaagtatgttcaattttctgcaaacaatgatagcggtcgagaaagtattcaccatgtgcactttgaggaactagacttaatagcttagctggttcgtaacctgggccagcgtcactggccaaaaagatcgtttgaccggcaagcttataatggcggtctaaataatcacttagtcgtgcttcaagccgtccttggtgcccaacactgagaaagtcatgccgattaatgatttgattagctactcgctcataaacccgataatggtgcacaagagtcagctgacctgcttcttttttacctttaatcataaaggcatcaccctcaatagttaaatttttaggcatatggcgaggagtagcttggtgttcttttgcttgagtttgtttagctacctgatttcctaactcatgcacggcgtgcattaccgaatcggcagtaattccgctgtcaaatacaaggttcaaaatgtcggcagtattgcgcattgtagttgtttgggcaatcttagccatcatcattaagtagtgtggcgataaacgacgacgtggtttaatttttaattgttggtctaagtaaaattcacgtttctttgtcccagcctgataataccgtcgttgaaaagtcaccgggccaaagataaaattaagcgtccgtggctgtttattaattacttgatagttcgctggagcttgggactttaagcttcgatctaagctttccaaaaagttttgcatgattacttgtcctaactccaataccccttttaaaataatctgttcagcttcaaataaactgcctgatttcaccaaattctgctcgatttctgttaaaatatccatgaggaaagacctgcctttgcttagtattcgacacactaaaggctactggtcttttctttttttgtaaataagtaaattggtctacaaaaaagatttccacgaccagatgaattattcatccaacctatgaaaatcttacactaactcttaaaactaaattctttacaaatagttagatatttgcaaaaataattatgttcacaggattaggattttgagtatacaaatgatcggaggggttaattatgctcgaacttcatctttttgtgaatccattaggaatgcgctgtttacggtgtgaaaaagacgtgttaaaaattgatcgtgatttaaatacaaaaattagttatcagtttgtaccactattcaatatgaaaacgatcgatagcacacttaaatattatcatcttaatccccatgatcttgctgcaagacaacaagtatcaaaaacccttaaccaaataatactagattataaagcagccctcttccaaggacgaaaacgtggacggcattatctcttacaattacaatctgcgcttattaaccaaggcttggattacaacgatgaattaattaataaaattgcacatggttcacaccttgacttagaaatgttttttgaggatcggcaaagtcaacttgctaagcaggctttccgtcaagatcaaaaaatcgcaagtgatctaggcgtatcagaaacggctaccgcagtcgtttttaacaccgaagattctgattacggcctaatgattccaaattttgactataatactttaataaacgcatttaaaagcggaaaattggctcgatctgcatccttagatgaatttgtgaaccaatatcgtccgccaaagctacaaattatacaaaacaataattaataaaaaagagattggaaaagttggcctttcattattgcaccatctatccaacctctttttttattttctgcctagaattgtaatcgttctcttgaaaaagcaagctttactagtttccctagtaattttttgctttcgtccactgcggtttcggccatccgattattaattgtggttaaaaatgcactcacatcctgatgttctgctatttccttatccgtattattttgaacattcattgtttttgccattacttgcaattcaaagttttcttcaatattctgtgcttgacgataattttggtccccaagcgcagcaattgtatgagtgagccaatacatatcgtctattgaatattcagtactagtgtttcgataagggattggtgtatcgtcaatatttgcataaaagggaaccactgcattaaaagtattaggaccaaatgctaaccaatgaacaccagcaatacttgcaggaacattattacgtatttgtagaatatgtaattctaagtttcggtttagtgcaattgacctaaatggagctttatctctttctaaatgatacggatcaaaagctgtcccttgataatgagaactcattaacttcttaatcgtagttacagtaagcttttcttttgcataacagatgaatggaaggttattactttgcgggttagcatttatcgtccctagttgctgctgaacataccatgctcgtgggttgttatagatagtatcagtagcagttgcacttccacaaatatgtcgtaaattgtattcgtcttcgctaggattcaacttattttgatcaatccactgtttcaaatttggtgaactcattgtgttgggactatcaaaatcaaaattagtaatattaaatcgattaggggcaatcacataggcattgtcgggaattttaacagctacccaatgatgaccgccaatcgtttccatataccacacttcattattatcactaaaagctatcgcattagcctcataagtgccatacttttctaataaacttcctagtttcttaacaccatcttgagcactcttaatataaggaaggactaatgttacaaaatcttcttcgccaattcccgataaggtgttataaggatctattgctaatatccgggcattagtagtaatagtttcagtcgcactcatcgcaacattcagaccattgataccgcccgcaccaaaaattccatctttatcgtcagcatcaggcgtagaagtatattttagcttaggaactggtaaatcaattttaaagtcagttgttttgctttgatatttacgtggctgtctttctggttttactaatacaaatctttgaggatcaaatgcattactataatcttcctcacgacaaactatagttgacccgtcaatcgttgcattctttcctgctaaaaacattgtacatgtgtgttgcatactatgatctccttttaaccagctgtagttttaactgtgaatcattaaaccatcttggacgatgaattaaaataagatgattatcccttctacaaattactttaaaggcaattaattcgtttgtatattggttgataataatattgcggattgtttctggaggtaaacaaccagggaataaccaattgcttttgtttaccttcattaataatcttttccattccttatctctccaagaataaaataaagggaatttctctatctctaatattacaccaattcgccagataatcattggaatagacattgccggccagcttgcaatgagatcatggcatactagtggacattcagataaagcatgtccagtaagttttaaagcagttaatgatagttttcttatttctttatttggaaaatgatactgtttcttctttaacatttcaatctgctccattaaaatagtttttttatcatactttaaccggctataggagcaacgccaatatttctgatcaataactaattgcgcccttttcacatcccaaaacaagagaacaaactgccttctaaagatttgcgtaaactgaacgattttcttatttcccaagttacgcaaataaggcgatcctaatatccaccaaaccggaattcttaactgacgatacccttcattacgtgctaataacttttcaaggcttaagggactacattgaaattcaactgctacagtttgtccattaatttctaaaagaatatccggtcgttgagtaattgttggaaaatagacttctaattgcggattccaatgatgcttttgtgcccattgataaatctgttctttcccttttaaatgttctaatgtttcaccctcgctaaagccacagtcatttcccttcttatgggcataatgagtaatcttatgctttcctcgccgcaagatcactccctgcccgcatcctggacaataatatgccatatcgctttttgcgttttcagccaacactaattgatcgttatgaactgcaattaacatttaatccccctatatatttatatacggaaattactcaattttgcacgaaaaaaaactacgttgagtatgaactcaaacgcagcttattcaaaatagtgtcgaattaaatgcaaggcagatactgacattattttctttccatgttcacttaaaaaatcaaccgttgttgccgtgggatttccatattcataagcaagagcaagctgatctttaacatcattactgttcaaaatagaatcagaataagcaattgctaaataatacaaatcattgtacttatataaatatgatgaaacatcatcattatcggcaattttcgcaaaatcaattaaatcttcaaaagaatcaaacgtaattacttgccagttcgtgtgctgaatctcattatcttctgaatcattaatcgctgttttcctttgatcttgatcttgactatttttttgaatcaaatgttgcttaatatatttggacacctggtcattaatcggtccatgctgttcattcccagcaaaattagaatcatttttactaataaataattctaagccattattagtgggcatcacctgaaaagtaaccgcatcgttattttggaattggcgatcagtatctacttctttcaggatactataaaagaaatcctctatttgctgatggtcacctagcaaatctagaatggtgataccccgagcagataaatcatcattatctaccaaaacgcgaatagtattttcattaatgcgttccatctccattgagcagcacctccttttaccaaaactagatgttacttctattgtaaggattttcgcttaaaagtaaagttactcggttaaaagaataaaaaaaggaaagcataatactttccatattctatcagttaaatcatatttgctttttcttgagcctctactagttctagttcacgaacctttcgtggtaagaagcgacggatttcgtcttcgttgtaacctacttgaagccgtttatcatcaataataatcggacgtcgtaacaatcctggatttttactaattaacttaaacagatccttcatcgacaaatcattgagatctatgctcaacttctggtaagctttagaccgctttgaaataatgtcttcagtaccatcttcagtcatccgtaaaatattcttgatttcatttaaagacaatggttcagaaaaaatattccgttccttaaaagcaatatcatgttcttttagccaggcacgtgctttacgacaagacgtgcaacttggagacgtatatagtgtaaccatttcgtttagtggcctcctttattaagttaaactagaacattcattaatacattgtttattatactccctattcaattaatattaaagcgatataacaaaaattattgactttttgtaagttctattgatattagattttccatttatgtcttatcaaaaataaagtagataaaatttacaatttaattattttacattaagttgtactataataagtatgactactaacttctgaggagggattaatatgttaacaaaaattagcttaacatttggttcacgacaaattttacaatcaatcattgataaatatcccgaacgtcattttaaattaatgcaggcaactactcatacaagaaaattagcattatttgatctttctggaaaagatactatttttcagtcaccagtaaaattaacaactcttgattcaacgctagatgctcaattaaatggaatgttttactaccaatcatttcaagtaaacggtgaccgtcaaaagctactttataatacacttcaaaaggtattaactgaaccagctaatatgaacggtggttatatgcttagcgttgataataaagcggaagctactactttagttttactaactgcttgggccgattttgaagccttaactgcatggaaggaaagcgatactttcacatccttaaagaactttactagtatggggtcagataatagttattatgatgagatttacaaacccattttttaataagtagataacgtagggtatttgccaatggtatttaactgatacctacaacaggactatgaattatcatttttggtaattcatagtcctgttttttagggtatacactttctggtatggatagagattccatgccaaattttttatcccgaaatgtcaatttaagttagaaagaaagtagttgctcatcagtgacgtaggacatgaatacctcatatggagttcgatagcctagtgatttgcggggcaggttatttcgcttactcatcagttgggtcaccaattcatcgggaagattgcggaaatttagccgttttgttaagccgtcccggcgtaaaagaccgttgttgttttcgttcagccctcgttgattgggagcaccaacctcggcaaagtaagtgtgaaggtcaaattgattggcaatctcgcgccagccggcgaattcttttccgttgtcaaaggtaatcgatttgaagaagtgccacggaaatttacgaagccactgacctaagtgttggttaatcgcatcagccgtcttttcgtgcacattgagtacaatttcgaccttcgattgcgttcggtcagggtcattaccgccccttggtgctttttaccttggacggtatcagcttcaaggtgcccaaattcagtggcatagtgcggaaagtccttggcacgctcgtgaatacttcgccccaattggccagccttcccgcggcgctcgacatagccattcgggtgccgcttacctcgcatcggcaaggaacggacatcgaagccgaactggccacgttcaaacatccggtaaagagttcgcaggctacaactaattgggcgctcagcgcgcccaataatggtatcaggcgtccacccctgggcaattttgtcgttgatataagtgagttcagccagtgacaactgagtacgttttcggccacaacgttgcttattgcgcatatagtgatcttgataatcagcaattgaggcaccggtttccaggtaacgataaacgcgataaacggtttcggcgctacggttgatcatttgggccactcggtacgctctaagcttttgcacgaaagaatgggcgatgattgtcagctcgtttgtggtaagatgggtgtaagtcatttgtggtttcctttcttttgtttaggggtattcaaaagtctaccacaaatggcttttctatttttctaacttaattttacaaacggcgaatggaataacttcttcaatctgtggtaaaccatctaaaaaagtggtccgctgaccagattgctttgctttccggtgacgcaccacttgctttattttcttttcagtcacttccgtgactgaaatatcaggatcttgaagttgatccatttcttgctcactaaataaggattgttgtccatcaacgacgggctccattacttcagtctttttcccaaatatttggttcttttgaagtttgataatagctattaattgagcaatcttttcattgaccatagctaattgttgtttaagttctttgatttgttcttccgctgtttgcttcatggtacgtcacctcctttgaattattctttggtaattatatcaaagaattcttcttttaaatagaggtaactcaataaaaacttcccggtcgaacagcttgaattttacgaattggtaatgggttcagtccttgcaataaccagtcgagctgttgatcagataattctttggcttcattactgtttctcggccaactaaggtggccattttcaaaccgtttatagagcataataaagccctcgccatcccaaaacaatcctttaaagcgattattacgtccgccgcaaaataagaaaagcgaattattatataattctaatccatagttctcagcgattaccattgcgagcccatcaataccttttcgcatgtctgtttttccacagactaaatagatataatctgggtcatgccaattaacgagcataacgaataaccactttaacgatatccgaagctaaaacagaattagtccccttgaaaatcgttaattcgacttcattcacattaatttttacggcagggcgtgccgtaaaagaatgcttttgtaaattacttggcttgtttttgaaaactggggtaataatttcattttgttctgtcataaataaaaaatctccttactgatgatagtctcagtatagaagatccggggtagctagagctagacgtactgttattgactgcttacgatattgtagagcctttttaattcgtattttattaactgtttaccttttactaacaaaaaaacttcccacctatccgtagaaagtttttatttatcattaattatacggtccgtacgagactcgaactcgtgatctcatccgtgacagggatgcgtcctaaaccaactagaccaacggaccaaaattgcgggggctgggtttgaaccaacgacctccgggttatgagcccgacgagctaccagactgctctaccccgcgataataaagatgacccgtgcgggatttgaacccacgataccagcgtgaaaggctggtgtcttaaccacttgactaacgggtcattacggagaaggagggattcgaaccctcgcaccgcttgcgcgatctacacccttagcaggggcgcctcttcagccacttgagtacttctccaatgggcctaaatggacttgaaccatcgacctcacgcttatcaggcgtgcgctctaaaccagctgagctataggcccatatctaagcgggtaacgagaatcgaactcgcgacaacagcttggaaggctgtggttttaccactaaactatacccgcataatattaagttaatggcgcgggacggaatcgaaccgccgacacacggagcttcaatccgttgctctaccaactgagctaccgagccaaatataaacggtccgtacgagactcgaactcgtgatctcatccgtgacagggatgcgtcctaaaccaactagaccaacggaccaaaattgcggggctgggtttgaaccaacgacctccgggttatgagcccgacgagctaccagactgctctaccccgcgataatataaggaggatgagggattcgaaccctcgcgtcgctctcacggcctagcggttttcaagaccgcccccttcagccacttgggtaatcctccataatgaactaataagattaaacaataatgattcatcaaagctaatctctgatggaccttgtaggactcgaacctacgaccgggcggttatgagccgcttgctctaaccaactgagctaaaggtccaaaacagccagccaatcgcggcgggggggatcgaaccctcgacctcccgggtatgaaccggacgctctagccagctgagctacaccgcgaaaaaactaataatatattaattttataaatcgggaaaacaggattcgaacctgcgaccccctggtcccaaaccaggtgctctaccaagctgagctatttcccgaaaaaatgcacccagaaggagtcgaaccttcaaccttctgattcgtagtcagacactctatccaattgcgctatgggtgcataataagtgccgaggaccgggatcgaaccggtacggttatcactaaccgcaggattttaagtcctgtgcgtctgccaattccgccaccccggcattatagaactggcaaagcggaagacgggattcgaacccgcgacccccaccatggcaaggtgatgttctaccactgaactacttccgcatatgaaagtgccgactagaggattcgaacctccgaccccctgtttacaagacaggtgctctgccaactgagctaagtcggcaattgacactttgtttttttattatcagataaaatttctgataatgagccgtgacgggcttgaaccgtcgaccctctgattaaaagtcagatgctctaccaactgagctaacggctcatgagcttaatcgctcaatggaggatacagggctcgaacctgtgacctcctgcttgtaaggcagatgctctcccaactgagctaatcctccataagcgtggcaacgtcctatcctcgcagggagcgatcccccaactactttcggcgtgttgaagcttaacttctgtgttcggcatgggtacaggtgtatccttcaagccatcatcaccacactctttgtcccttcggacgagagcttgtgctctcaaaactaaatcctatctattctcttccaataaaccttaccgctccttggttaagtcctcgaccgattagtaatggtccgcttcatgcctcacggcacttccacttccatcctatctacctcatcatctctgaggggtcttactttcccgaaggaaatgggaaatctcatctcgaggcgagtttcacacttagatgctttcagcgtttatctcgtccatacatagctacccagcggtgctcctggcggaacaactggtacaccagcggtatgtccatcccggtcctctcgtactaaggacaggtcctctcaaatttcctacgcccgcgacggatagggaccgaactgtctcacgacgttctgaacccagctcgcgtaccgctttaatgggcgaacagcccaacccttgggaccgactacagccccaggatgcgatgagccgacatcgaggtgccaaacctccccgtcgatgtggactcttgggggagataagcctgttatccccagggtagcttttatccgttgagcgatggcccttccatacggaaccaccggatcactaagcccgactttcgtccctgctcgacctgtctgtctcgcagtcaagctcgcttgtgcctttacactctgcgcatgatttccaaccatactgagcgaacctttgggcgcctccgttaccttttaggaggcgaccgccccagtcaaactgcccacctgacactgtctcccagcacgttcagtgctgcgggttagagtggtcatattgcaagggtagtatcccaccagcgcctctgtcgaaactagcgtcccgacttctacggctcctacctatcctgtacaagcagtacaaacactcaatatcaagctacagtaaagctccatggggtctttccgtcctgtcgcgggtaccctgcatcttcacagggatttcaatttcaccgagtctctcgttgagacagcgcccagatcgttacgcctttcgtgcgggtcggaacttacccgacaaggaatttcgctaccttaggaccgttatagttacggccgccgtttactggggcttcaattctgagcttcgccgaagctaacccatccttttaaccttccagcaccgggcaggcgtcagcccctatacttcatcttacgattttgcagaaacctgtgtttttgataaacagtcgcctgggcctattcactgcggctggccttgcggccagcaccccttctcccgaagttacggggtcattttgccgagttccttaacgagagttctctcgctcaccttaggattctctcctcgactacctgtgtcggtttgcggtacgggcagttaactactccttagaagcttttctcggcagtgtgacatcggcaacttcgctactttaatttcgctccccatcacagcttgtcaacacggatgtaaacatttgactcacatcctgacttactgcttggccgtactcttccagtcgtacggtttgcttagcctcctgcgtccctccatcgtcaaacgcagttaactggtacaggaatctcaacctgttatccatcgcctacgcctctcggcctcggcttaggtcccgacttaccctgggaggacgagccttccccaggaaaccttagtcattcggtggacaggattctcacctgtctttcgctactcataccggcattctcacttctaagcgctccaccagtcctcacggtctgacttcgccgcccttagaacgctctcctatcacgtgcacatagtgcacatccacagtttcggtaatatgcttagccccggtacattttcggcgcaggatcactcgactagtgagctattacgcactctttaaatggtggctgcttctaagccaacatcctagttgtctatgcaactccacatccttttccacttagcatatatttagggaccttaactggtgatctgggctgttcccctttcgacggtggatcttatcactcatcgtctgactcctgagtataaatcgatggcattcggagtttatctgaagttggtaacccatgacggccccttgtccaaacagtagctctacctccacgattctttacctcaaggctccccctaaagagatttcggagagaaccagctatctccaagttcgtttggaatttcaccgctacccacacctcatcccagccattttcaactgacacgggttcggtcctccagtgcgctttaccgcaccttcaacctggacatgggtaggtcacctggtttcgggtctacaactacatacttttacgcccatttaagactcgctttcgctacggctccggtttttccaccttaaccttgcatgcaatcgtaactcgccggttcattctgcaagaggcacgccgtcacccattaacgggctccgacagcttgtaggcacatggtttcaggaactatttcactccccttccggggtgcttttcacctttccctcacggtactggttcactatcggtcactagggagtatttagccttgcgagatggtcctcgcgggttccgacggggtttcacgtgtcccgccgtactcaggatcctgaacagagagtgtgacgtttcgtctacggggctttcaccctctatggcacagcttcccaactgttgcgactacgtcgcactttggtaactctaatgttcagtcctacaaccccaacaagcaagcttgttggtttgggctcttcccttttcgctcgccgctactcagggaatcgatgtttctttctcttcctgcagctactaagatgtttcagttcactgcgtctacctcttgctagctatgtattcactagtcaagtaatcagcgactaagctgattgggttgccccattcggaaatctccggatcaaagcgtacttaccgctccccgaagcatatcggtgttagtcccgtccttcatcggctcctagtaccaaggcattcaccatgcgcccttcataacttaacctaaacaatcaaagattgtctgattaattgagttagcgattataattcgttaattaaaactcaaataacgcggtgttctcggtttattgttttgttaataaagaaattagatagtatttagttttcaaagtacaaactctatcaaccttatggttgataatggagaataacggaatcgaaccgatgacctcctgcttgcaaagcaggtgctctcccagctgagctaattccccatatgggcctaaatggacttgaaccatcgacctcacgcttatcaggcgtgcgctctaaaccagctgagctataggcccaaataagcgtcttataagttaaagttttaagaggtaaacctctcaaaactaaacaaagtttctccgatgtgtaggttccgttttattccttagaaaggaggtgatccagccgcaggttctcctacggctaccttgttacgacttcaccccagtcatctgtcccgccttaggcggctccctccataaaggttaggccaccgactttgggcgttacaaactcccatggtgtgacgggcggtgtgtacaaggcccgggaacgtattcaccgcggcatgctgatccgcgattactagcgattccgacttcgtgtaggcgagttgcagcctacagtccgaactgagaacggctttaagagattagcttactctcgcgagtttgcgactcgttgtaccgtccattgtagcacgtgtgtagcccaggtcataaggggcatgatgatctgacgtcgtccccaccttcctccggtttgtcaccggcagtctcactagagtgcccaacttaatgctggcaactagtaacaagggttgcgctcgttgcgggacttaacccaacatctcacgacacgagctgacgacgaccatgcaccacctgtcattgcgtccccgaagggaacgccttatctctaaggttagcgcaagatgtcaagacctggtaaggttcttcgcgtagcttcgaattaaaccacatgctccaccgcttgtgcgggccccgtcaattcctttgagtttcaaccttgcggtcgtactccccaggcggagtgcttaatgcgttagctccggcactgaagggcggaaaccctccaacacctagcactcatcgtttacggcatggactaccagggtatctaatcctgttcgctacccatgctttcgagcctcagcgtcagttgcagaccagacagccgccttcgccactggtgttcttccatatatctacgcattccaccgctacacatggagttccactgtcctcttctgcactcaagtcgcccggtttccgatgcacttcttcggttaagccgaaggctttcacatcagacctaagcaaccgcctgcgctcgctttacgcccaataaatccggataacgcttgccacctacgtattaccgcggctgctggcacgtagttagccgtgactttctggttggataccgtcactgcataaacagttactctcacgcacgttcttctccaacaacagagctttacgagccgaaacccttcttcactcacgcggtgttgctccatcaggcttgcgcccattgtggaagattccctactgctgcctcccgtaggagtatggaccgtgtctcagttccattgtggccgatcagtctctcaactcggctatgcatcatcgccttggtaagccgttaccttaccaactagctaatgcaccgcaggtccatcccagagtgatagccaaagccatctttcaaacaaaagccatgtggcttttgttgttatgcggtattagcatctgtttccaaatgttatccccgctccggggcaggttacctacgtgttactcacccgtccgccactcactggtaatccatcgtcaatcaggcgcaagcaccatcaatcagttgggccagtgcgtacgacttgcatgtattaggcacaccgccggcgttcatcctgagccaggatcaaactctcatataaaatatataagaacttgaatagctctcaattatctttgttattaagcgaattgacttcgcaaatgttttacttcaaatcacatcgtgattgaagaccctacacatttgattcgtcgaaactttgttcagttttcaaaggtctacccgttggctaatcaagcagccaatcaacatttttattatagcatatatcagattagcttgtcaagaagaaattttaaattatttttgattttcttttgatcgataactcaatcagcaactttattaatatatcatgttgtcaaatctatgtcaacaattatttttaacttttttgtcaaaccatctcaacagcgcttaactgttttgacaacgataattactatacatgggtttttattccccgtcaactgttttttctaaaaaaattaaaaagtattctcaaggtcatataaacagttaaaaacttcaatagcaactaggtcaatatcatcaaagcgaaaacgttcataagggcgatatcgaacgaagataaattcttccctactatggatataagttacatcacataatggaataccaaatttttcaaatgttcgtttctgtcgatctcttgaatcatcgttttgcatcgcaatcaaacgtttaataatcactaataattctgattctttcacaatgataatcctccttcatacaaataaaggatcgtgccttcacacaatccctttttctatctttttactttatcaggttttataaatacagctacaattccggcgaacattccgaagtaatatgtgagtagtcgccataagatcattgctaaaatcaattttgtatttgagtgaataaaacttgcaaagagaacggaaaaactatactcggctccccccgcccctcctggaattggaaaaagcgaaataatcataaaaattaacacgtgcaagctgagcaccatcacaaaattaatgtggtcaattccaagtgcaagcataataaagtatgggattgcatagtaaaagaataattgaaaaatagttactacgcaaaccttaagcagcttcttataatcttgcttcattcggagactctcttggtaaaaagtatccactttttcatttaagacaactttcatgtgctcatatcggttagccttcataaaaatggcagctggtttgataacgaggttcattagtctcttagtaaaactataccagtacatcaccatcagtaatccgacaattaccgctaaatgaatcaaaaagccaaatattactaataatgaaagagcatggagtttctccgcaataaaatgaaagccaattaacaagctgattaagaagttaacaacaatcattgcctgaaatacaacaaacttcattaaaagaactgaacttgctaatccccatcaacacctgattgaatcattgcaactaattgcgctggttgtcctcctgttgagaatggagtaattccattaaatagttgttcgattaatggtaatcgtaatgcatccttccaggtaaaaccatcgtgacgatcattcataaaaatctttacgacaaccgcctccaaacctaaatataaacaaatacagccaagtgcaacgagcatccatccccaattaatggcagaaacatcctgtaacaataggtggatgtttgagttacgtaatgagtagccgagaattccaactccaataattagcattatgcttaatactaaccaatttcgcctgctcactaagcatccccctttcgcgcttgctcctgataaaacttagtccaaacatctgctaagtgttcttttgagtattccttagcagctcgctgggcctgagtttgccaatgtgccagtcgtgcaggatcattgcgtaataatgtcaacttcatttgcatctcattgacatctttagcaggctcataatccccttcaacaatagaatgataaaggtcaagatcgcgtaacattactggtgtcccacagctaaaagcttccaagacagacattggaaatagttcattatatgaaggtaaaagaaataggtcggcaagattattcagttcagcaatcttatcccgtgaaacgattcccgtaaaatgtaaattagctggtggattatctaccaccttttttaattcactataaccatctgttaaacggccaaaagaaaatccgccagcccaaaaaaactcaacgtccggattttggcgagcaagacgaataaagtctggaactccttttcgttcttgaacctggccgcttcctaataccacaaacttatcggcagcaatcccatatttttttcggagagcagttcgcttaacagccgaatatggatggaaacgatcattatcaacaaagttaggaatataggtaatctttttttcaggaatcccatatgctactaactgcttgataaaagagggattcacaactactaactgatccattcgtttataaaaggcaataatgtaatgataaaaaagcccgcgaaacggttgcgggattgtaagacttccttctaacgtctcgggaagaaaatgcacatagccaatctttcgaccccgcttttttgaaaaagttgacaggtaaaaaagagggtcgattgtatgataatgactgatctgactcttcccataacggttgatttcaatttcaaatttgtcactgcactggttgcgcaacaagttaattaattcaagataggcacttcctactccttgtcccgcaaccttatctgcagatgaaaacattgttattttaatcatcattagctccttgggcggtgaaaaagacgatgtgatttttcagcttgattaagttcatcatggacagccatatctttttgacaatcctggtagaactgaacaaccctttcaacaaagacctctgctgagatctcatgcagcttttgttgtcgtctcacccttgattctgagttttttggttggttaaggtaaaataggacaccattaaccaagtcagcccgtttttgaaaactaatgccaatcgctgggtcatcaatcaattggtcagtatattcactacgcataaccacaattggcaaatccgaggcaagggcttcatcataagtcagtccttgtgattcagaatcggaggctgaaacaaaaacatctgccatttggtaataatggtaaacttcatcatttgatatctcaccagcgaaactaacattgtcattaagctgcatttcacgaacttgacgctccagagtatgtcttgcgggaccatccccaacaatcagcagctgtgcatcaggcttgtgagcaagaatatctggcattgcttctatcagtgagtggatattcttttcatatgctaaacgactaagcgaaagtaaaactggggtctcttcactgtagcctaactttgcccttaaattagctatttcttctgctgaatctcgtttactatatacccgtaaattaatcccagtcggaataacacgaattggtgattcaacatgataactggttaaagtatccaaaacacggtcacttggagcaataatcccagaaatattttttaaataaagatgagcaagccgggcaacatcattcggcttaagaatatggccattcgcaatatagtggagataatcctgatacatcgtatggtaagtatggagacaagggatatgcaaatgcttggcaaccgtcttccccataactccaagcgcaaattcagtttgattatgaactatatctaattggaactttttagcaagcttgatggctcgaaatacgccacgcaccgcaattcgacgatcagaaaacgaaacaaagggaatgcttgcaaagcggtatatcccattttcaacatcatcatgtttagccttaggatcagttgtcgtaaaaatatatacatgatgtccctgagcaatcaattcatcacgaagcgtcttaatcgaagtcgccacgccactcacctgagggaaatatgtatctgtaaaaataccaatattcaacctaactgctcctttttcatcataagttttctagataataattagtcataactgctattatactaaagcattcactgaaccgcaaaacggatttaagatattttaaatcttcctcctaatagtaacaagactcgggaagcctgattaagatttctttacaaaatcttttaataatgagaataaaaaataaccctcttgaaatggtgaacaatcaagaaagttaatttcatttatcaaagttttacctgtggaacatacttttccactaattcttggaccgccacggcagtttcagcatgaatcgctcgatgaactaatggttgtaatttgcgcgtattcaactggttaattaaagagcgaacacgtaaaatctgactactgctcattgaaaattcatcaagccccatcgccattaatagaggaaccgcataaggattattagccatctctccacacattccgacccacttgccttcagcatgcgcagcttcaatcacttgccgcaccatccgtaaaactgctgggtgaagttcttgatataggtatgctacttgctgatttccgcgatcaacagcaaataggtactgaataaggtcattactgccaatgctgaaaaaatcaacatattttgcaaaatgttcagccataactgcaactgctggaatctctagcatcatgccaacttcaatatttttagcaacttgaatacctgcttgctcaagcttttctttttcatcgtcaagaattgctcgtgccgcttggaactcttcaattgttgcaatcatcggaaacataatggctaaccgtccataaacggatgcacgaagaagggcgcgcaattgaggacgtaatatttctgggcgtgccaatccaatcctaatggcacgaaaacctaggtaaggattgtcctcatgaggaagagcaaccatccccagctttttatcgccgccaatatcaagcgttcgcgcgactacccgttgtccgttcatcgctgaaacaaatcttttgtaagcattaaattgttgctcttctgttggcaattcatccttactcatatagaggaattctgttctcaaaagaccaattccctcggcaccatcctcttgagcatcaataacgtcagcaaatgttccgacattagctcccacttcaaatcggcgcccatcagcactcacagtttgcttatcttttaacgctccccacttttgctgctcctggataaatttaccggctaacaaacggtaatgctcaacctcttccttcgttggattgacaatcactttgccatgaatcccatcaacaatcagtaagtcgccatcatgaatgatcgcagtagcatccttgacaccaacgacagctggtaacgaaagagtcttactcataatcgtaaaatgagaagtccgccccccgttagttgtaacaattcctgcaacatatcgtttatcaaattgagcggtatcagtaggcgtaatattattagcaacaaagatcgcgcggtggtctaaaagtcctgggtctggtaaaggaacattcaataggtgactcaaaactcgtttggtcacatcacgcaaggcggttgcccgcgcatataaatattcattatcgttcttgcgctcaaaaatacttaaataataatcttcaacgcgtttaacagcccactcggcggtatcatgatggctattaatacggtcaataatcttcttttgtaaagtcggatcgtctaaaatcgcaatttgggtatcaataatcgtcactgcccgttgacctaacagctcatgggcacgcttagataaatgctgaaattcggtcttgcttaacgcaaaagaatcatgaagccgggcgacctcatgattctcatcagctgtatgctgtttttttatagatagatctgactctactaacaggtgtgccggagcaatcgtaataccactactagcggcaagtccggttagtagtatagacattagtcagtcaatccttccttcttcatagtttcagcaacggtgtccaaagcttctttttcgtcgtcaccattagcagtaatagtaaccttggcgttttgaccaacaccaagggacattacacccatgattgacttcaagtttacactcttaccttcgtatgaaagagtaatgtcagatgaaaactttgaagcagcttgtaccaaaatagtagctggacgagcatgaataccagtttcagaagtaattgtaaattcacgtttttccatattaatcagtctccttcgagcagatataattaatttattatcagtagcttgaccactgatacacctcgataattacattttagcaattgtaagcgttaaatacaaggctacatcttgcgatttatcgctctcttaattgataaataactttaccgcctcgctgcgcttcgcctttaatttgcgaacgatacgcatacgagtgaaaaattggttgaaattgctgaaaattctcaggggtaattacaaaatgatcaatctttttatttcgcaagtcatccaacaattgctcaaaattttcttctgccattcaatcacctcaacataaaattttattttcttattatacacgaaattactttcatctttctattttagcattcatggctaaagagtgctaaaatcaaagtaagctgttttcggtattcctaagtaacttagctatgcggaaaatcgctctttatttaagaaaatatttaagttttatggcttgctttgcgataaaaagtaagtataatattaatcaatggtcaagaaaggtcaaaaaattcttgatggaactatttaggaggtattaaatttagatgcaatgtcaatactgtcatcaaaatccagccacgattcatcttcaaatgaattttaatggacaacggattcaaatagacctctgccaaaattgttatcaaaaattacaaaatctacaaacagatatgatgaatggaggtaacggaatgaataatttcggttttggaagcctcgaagacttcatgaacgcaatgaacaatatgcaaagccaagctgctggtgctaatggtcaaaacatgaacggccaatcccaacgacaaggtggcggacgaaatggaaaaggaatccttggtcaatatgggatcaaccttactgatctcgctcgccaaggtaaaattgacccagtcatcgggcgcgacaacgaaattaaacgagtaatcgaaattttaaaccgtcggaccaagaataacccagtcttgattggtgaagctggggttggtaagaccgcggttgttgaaggcttagctcaagcaatcgttagtggccaagttcccgaaaagcttgctaacaaggaaattatccggctcgatgttgtttccttagttcaaggaacaggaattcggggccaatttgaaaaacgaatgcaacaattaatggaagaagttcgtaagaataaaaacatcatcctctttattgacgaaatccacgaaatcatgggtgcgggaaatgctgaaggcggaatggacgctggaaatgttcttaagcccgcccttgcccgtggtgacttccaattagttggtgccactactcttaatgaatatcgaaagatcgaaaaggatgcagctcttgcacgacggttccaaccagttgaagttgatgaaccatccgttgaagaaacaatccgcatcttaaacggaatcaaaaatcgttatcaagattaccaccatgttaaatacacagatgacgcaattgtagcagctgctaaactttctgaccgctacattcaagatcgttacttacctgacaaagctatcgacttacttgatgaagcgggatcaaagaagaacttaacgcttaaaaatgtggatccaaacgcaatcgaaaatgaaatccacacagctgaagcacacaagcaacaagcagctgataaccaagactatgaaaaagcagctttctaccgcgatcaagtcgctaaacttgaaaaggcaaagaaagaagctgaagaaaaccatactgaagattctgcaactgttaccgttaaggatatgcagagaatcgttgaagaacggacaaatattccagttggtgacctgcaaaagcaagaagaaaatcaacttcgcgaccttgataagaagcttgatgaacatgttattggtcaaacccaagcagtggataaggttgcccgtgccattcgtcgtaaccggattggtttgaacaagtctgggcgcccaatcggtagtttcctctttgttggtcctacaggggttggtaagactgaaactgctaagcaacttgcccttcaattatttggttctaaagatgccatgattcggttcgatatgtccgaatacatggacaagacctctacttctaaattaatcggggctgctcctggttatgttggttatgaagaagctggtcagttgactgaacaagtacggcggcacccttacagcttgatcttacttgatgaagttgaaaaggcgcacccagatgttatgcacatgttcttacaaattcttgatgatggtcgtttaactgattctcaaggacgcactgttagcttcaaggatacaatcattatcatgacatctaatgccggaactggtgattcagaagcaagtgttggtttcggtgctgagtctaatggtagtacccactccatcattgacaagttgacaaactacttcaagccagaattcttaaaccggtttgatgacattgttcaattcaatgccctctctaaagatgacttgatgaagatcgttaacttaatgattgatgatgttaataacatgcttgctgataagaacttgcacatcgaagtcactaacaatgttgaagaaaaattagttgacatgggctttgatccaaagatgggtgctcgtcctcttcgccgggtaatccaagaacaaatcgaagaccggattgctgattacgttcttgatcacagtgacgctcataaattagttgctaaacttgatgataatggggacattgttgtcgaagaaactgaagaagtaccaacaattgctaaaaaataattgagtataaaaaacgaggctgaattttttagcctcgttttttatatgctcaatttacttccaaacgacggcggacctccaatactggaagagcaaccattggaacaataataatcgccaatatcaattctgcaagtccattagtcgccatgactgtttctaaagcaattaataaatgattaacatttaccccataagtttgcgcaactgctggagtacgataaaatagataaataaagcctaatactaagccagtattagtaagggctcctactatcgcagcacttactgcggcaatatattttactttgaacaaacgacacataaggataaaagtatagccagctaaaatcccaatcataatgcgcgggacaacggaaacaagcgggttaacaaaaactaagggagcaagcggactacttggtgcaacaaatgctcgcacccaagtcaaaagcccccaaataccaccaataattgcgccatcaacgggccccaacacgattgccgcaataatgactgttacatgaagggttgtaatactaagcggccctagcggaatgttgccaaaaaatgtgacaaaatcttgtaagagaataattgcgataaagattgctaatgtcgtattgtgcctaatttgttggtgccgtgtttttgccatttttcttctcctaaataaatttgaataggcttattgtaataaaaaaatcacctattcgcaattctcaagagaaatatggtcgttccttatcgtgtcagctactaaaaagcgctataataatagagaattaaggttacggagtgttaataatgattgacaagtttaaaacaggaaatcctatctgggtttactataatgatatcgattcaggagcaaaccttaccgtcccgcaattattacgcggattcatcggtcaagaataccaaattgaacaaaaacaatttcctaattaccgatacgtaaaaactgaaggtgaaactaagggaacatttgatatgcggcaacgaattgtgcaccttttttatcggaaacaaaattggggagaggttcaatcgattgaaatgtatctccacctcgatgcccctacacaggtatttgacacagctggtggaatgccagtcggtgccccccttcctgctgatattacagttaagtcttttcaccgggttgcaactaagaatggtcagttttggtatgaaatcggcgctgatcaatggattaaatacgatcaaatgcacgttgttgacaatccattcaaccaggatatccggaaagaaaaatcaaaacttattaataatttaacagtgattcccttgaagaatgttcaggccaaagttgattatctccataataagtcaatcaatgtttacgatgcgccttatggaaataaagtggcagagattccaaacggcgaaacaattaccctaattggaaaattaaacgataatgatgagattacctggtaccaagtgggccgcaaaaaatatattactagcaactacattcaaattgaatatccggaagatgatgaataaaaaaagcgagaggttgagaaaaagcaaaagttttttctcaacctctcctatttttacaaacaatagcaaaataacatggaactagcttcgcatcaccacaaggctcaaggctcaagactaatgctcactcacttttattaatcccgccgtaattgaattttattattaaagaatcgcgctaaagcataaacaatgattaagtaaataactaagattacccaaccagtaacgtttgagattatgattgatttaaagacaccactagcagaaagtgcaggaattaagccaaccagtgaataagctaacatcatcaataaaactaggcacgccattggaagcccaattcctacaatccatttccaccgacgatttaataaggcaaaaccattaccaattgccatcatcgttaaagaaaaaccgaagtaccataaaagactatgccaagcagaaacaagatcaaacggtgtattcattaagcccaccagttgtgcgataaaccaaactactaatgtcatcaggaaaagagataaaatccgcccttgccatagtgttttacgagaaataccgttttgaattgcccatttaaagtcagtataaggagttacaaggaaaatcgccattaaaagcacgcttaagattgatgaagcaatgcttggaagggcttggaggctaaccaaaaaagattcaaggttgtgtgaaataattaatccaagcaggtaggttattaatgcaattcccagcccccaacctaaggcaattcctgtagcgtgacctgcttgttgaaacatggttgaaataacaaggtttctcttttgattttccattagtattctcccccattcgttaagtaaatgaataaatgctgcaaatcataatgaccaatcttaacttgatcaggaatcacacgctgttcatctaagcgatcaagtaagtaggcagtcttaatattacccatcatctccgttttaagaatttttaagcctgcagtatactcatcaaccattttttccggaccactaattgcataagccttggctaataaactttctgtatcttcattaataatgatgtggtgttgatccatgattagaacatgttcgactaattgttgaatttcttcaattaagtgagttgataagacgaaggttcgcggccgctcttgataagtcttaactaattctttatagaagctatcacggtgattagcatctaaacctaaaatcggttcatctaataaaacgtaatcggcattgactgctaaagcaacgatcagcttggaggctgtccgttgcccagtcgataagttagtaattttcatccggtcattcaagccaaaaaccttgaggagacggtttgctagatcatagtcaaaattattataagcgacatcggccaagtcaaaggtttgacttatcttcatgtgacgcggataaagattaacttcactcatcaaaaagatcttgctgaggaggtcatcattgttattaacgtcttcattaccaatttttacttccccgctcgttggaaaaatccggttgctcataatattaagaagagtcgtctttccagccccattccggccaaggagaccataaattttagcaggttctaggataaatgaaatattatccaatactgtttggcgacggtactttttgacaatatttttaactattaattgatccatcattctcacctcgttcgattaagtctaataaatgctgcttggtaatcccgagcttacctgcttcaactagcaaactctttacatagtcgttataaaaactttctttacgttgttccataattttttgttgtgcacctttttttacaaacatccctagtccacgtcgcttttctaagaggtctttattaaccaaaatattcatccccttaagaactgtcgcaggattgatatgcaattgctgagaaagctgggtcgttgacggtacctgcgaaccttcatcaaagcccccagagaaaatcatctcttcaagctggtcagcaatttgctgataaagcggcatcgagtcattaaagtcgaaattcataagtgcacctccttttcgtttaacacttcattacttatgtaactaagtatatatgtaaatgagagatttggcaagagggtaaaagaaaaaacttcctgctcggctgaggaggaagtttttaatattattgatctatccatgatttctgataactgtttgtggatccaaccattcaccatggcctgttgcttgactaggatcattccaacttggaacaaaggaattctttaaatcgatgccatagtttggactagtattaattcctaagtgaagatgatcaaggtcacgataaccaattacttgaccggcataaacgatatcgtttggtttaacagtgatcttatcacggttactaaatgcttcctggtaaacatataagtattttccgtcccaaacagttgtaaaccaccatagaactttaccatcatcatcttttaccgtatttacatctaatactcgcccaccatgaactgcatgaacttctgaacctggatgatcttgagtcccaaagtctaggccatcatggaagccattcttacgaatattgctggtataaccaaatttctgtccctgatagtgccaaccttcaccagaccgtggaaatggccaactccaaccgtcattttgcggaagtgcacgagcaatcccatcagtaccaaaatcataacaatggccgtcaacccattgaataccagtatacatttgaccataaagctgatcattgtaaacccataagtcatctgggtcacgttgaacgtcataaccgtctgagaaatagtagcgattaccattaatagttcgccaaccagtagctactttcttagttgcaggatcatcataataaacttttccccagctagtagctactccatttgcatcaaagacataggtatttccatcgatacctaaaaacttagattctgctcgtgagccatcattggtaaagtaaaatttttggcctttaccactggtcatccactgattatcccaacgtgcaccgtcactaccgaaataataggtccgaccccaattagtatagaattggttggtataacgcgcaccatcggctccaaagtagtaggtgtggccccagttattatagaattggttcttatactgcttaccatcttttctaaagtagtaaagcttcccgttttggttcaagaaataatcgcgttgcatccgtccttgatcatcaaaaagatatgttgcatcgccaatagtggcaacttgtgaagttgcccgtactccatcgccaaaaaagtagtaactattgccccaacgattcatccattgattatcccaacgtgcaccgtcttgcccgaagtagtatacattcccccaagcattcttaaacttatcatcccaacgtgcgccgtcagctccaaaataataagtccgaccccaattggtatagaattggttggtataacgcgcaccatcagctccaaagtagtaggtgtgtccccagttattatagaattggttcttatactgcttaccatcttttccaaagtagtaaagttttccattttggtttaagaaataatcgcgttgcatccgtccttgatcatcaaaaagatatgttgcatcgccaatggtggcaacttgtgaagttgcccgtactccatcgccaaaaaagtagtaactattgccccaacgattcatccattgattatcccaacgtgcaccgtcttgcccgaagtagtatacattcccccaagcattcataaacttatcatcccaacgtgcgccgtcaactccaaaataataagtccgaccccaattggtatagaattggttagtgtagcgagcaccatcagctccaaagtagtaggtatgaccccagttattatagaactgattcttatattctttaccatcattgccataataataaactttattatcgactgttttaaagctatttggttgcccagtttcagtaatgttttgttctgaagtatcggtactttgtgcagctggagtaacaggaactgctcccttattatcattaccaactgtgctattactagtactttcagtattgtcgatgacattttcattactagtattagtttgagtctcagtaactgattgttgaacttcaacattactattatctaatgtagaatctgcttgaacagatcctacgcctaaaatcgtccccgcaagaacaactgctacagtacaccaaagtttaccacttttatataacttaaaatgtttctttaattccaagattattttctccctgattgataattatttaactacaactgcaaaacgtttaatattatatgaattttcaaaattacttgctgaaacccagtatgatcctccagcaggatcttcaacgtgataataacctggacgataaccatcaagagtcatcacatgactattattaacacctactccccagaaataattaccatattgaggggcagcccaatgcatcgtgacatagacaacaaccgggttaccattaagtaattgactttgtaagtcagtaggagaagaccctgaaatattctgaacattaccgaaccgtgaaccccattttgctaaaggttcgggataaattgattgaaagattccataggttactcgttgatatccgccaccgaatccttcattaggattaccatttggtgaaattggcatcgttttaataaatgattgaatgttgtagttgttggcatatcccttattatgaagcgcttctaacaaggctgtcgcttcacacgccatatcaccaacttgatattgattaatgtaaggcgcatttaataaagtaccattaattattccactatttggatcaacgtaatagttctgatgtccaagaataaaatcctgcttttgtagggcaccgtcatcaccaaagtaataggtatgaccccagttgttgtaaaagcggttatcccaacgagcgccatcactaccgaaataataagtgcgaccccaattattatagaaaccattatctaagcgacttccatctgcttgaaagtaataggttcgaccccagttgttgtaaaagcgattatcccagcgagcaccatcactaccgaaataataagtacgaccccagttgttgtaaaagcggttatcccaacgagcgccatcactaccgaaataataagtacgaccccaattattatagaaaccattatctaagcgacttccatctgcttgaaagtaataggttcggccccagttgttataaaactgatctttatattcttttccatcagcaccaaaataatatgtcttaccatttctttgttgaaagtaatctgtttgcattattccttgtgcgtcaaatgaatacacatcattattaatttgagctaattgattagtataacgtgcgccatctgctccaaagtaataactatgaccccaatttgtataccattgattcttagaaaggatcccattattgtcataataatatgttttattgttaatggtattgaatgtatttggttttccagtttcagatatctcatctacattattactttgagattgtggtattactggaacttgaatttttccttcatcactagtattttgatccgtaagagtttgattactatctgaagatatattctgcgttatttcaacattatttaaattttgattttctgttgtactatcagcttttgcgaaagtaggtgttactattaatagacctagagcaattgcagcataacaccatttctttccacttttgtatagcttaaaatgttttcttatttccaaaataatccatcccaactgttaattttaattaaacattattatcataatatatttttttaatttcgccgtttgtaaaattaagttagaaaaatagaaaagccatttgtggtagacttttgaatacccctaaacaaaagaaaggaaaccacaaatgacttacacccatcttaccacaaacgagctgacaatcatcgcccattctttcgtgcaaaagcttaaagcgtaccgagtggcccaaatgatcaaccgtagcgccgaaaccgtttatcgcgtttatcgttacctggaaaccggtgcctcaattgctgattatcaagatcactatatgcgcaataagcaacgttgtggccgaaaacgtactcagttgtcactggctgaacttacttatatcaacgacaaaattgcccaggggtggacgcctgacaccattattgggcgcgctgagcgcccaattagttgtaaccggcgaactctttaccggatgtttgaacgggggcagttcggtttggatgtccgtgctttgcccatgcgaggtaagcggcacccgaatggctatattgagcgccgcgggaaggctggccaattggggcgaagtattcacgagcgtgccaaggactttccgcactatgccactgaatttggacaccttgaagctgataccgtccaaggcaaaaagcaccaaggggcggtaatgaccctgaccgaacgccaatcgaaggtcgaaattgtactcaatgtgcacgaaaagacggctgatgcgattaaccaacacttaggtcagtggcttcggaaattcccgcagcacttcttcaaatcgattacctttgacaacggaaaagaattcgccggctggcgcgagattgccaatcaatttgaccttcacacttactttgccgaggttggtgctcccaatcaacgagggctgaacgaaaacaacaacggtcttttacgccgggacggcttaacaaaacagctagatttccgcaatcttcctgatgaattggtgacccaactgatgagtaagcgaaataacctgccccgcaaatcactaggctatcgaactccatatgaggtattcatgtcctacgtcactgatgagcaactactttctttctaacttaaattgacatttcgggtttgaaaaacttttttcaagaaaaaattatctcttacagaaaagagaagtcgctatttaataacagacttctctttggtaaatttattaagcttttacttaaccaagccattttaaggatgcggtatagtttacaataataggttctccatagtttacattactagtttctacggatgcaagccagaaatcataataatattgatttccatctgcagttgtatacgttttgcttccttttacttctttaggtaaaagactctttacatcattaacagtactttcgctaacatctttacctttttctccagttaaagcttctttgatatcttttgaattcaagataccagaaaacgcattatcacttttatcagttattaaatctccctgctttagaggattatcgattttaatttcctcattgttaacagtattccaaacctgagatattttaatttgtaatggagaagttgctacttgagtacctggttcagaatcaacgactacagttgccgaataatttgcaattaatggttgtccatacttggcatctttatttgcagaaacaaacgtatttaccttattatttccgccttcaagccagtaaatatagtgataccgtgcaccatttgctgctgtgtatacttttgaagatattccatctttaagccgtccagctagcttagttaattcagcattaccaatcgattgaccatcatttccacttaattgagtagttccgaaaaggtctgtcgataactttgttccttcagttaatccatcattaggaataacgtcagtctcattccaaatttttactaattgggttgaaagagatgacttaacatttttggggctttcatatccatttaacattccattataaacgttcaatgattgcagtggatgtccatgatcatcaaataatgaaatattatcccaagatgaacctccccatgcttccttgccatcataatacaatactgaatctggcgcatatcctttggcatactgtgaagcccatcccgaaccataaatgttagacattaatttattatattgccaattattccacccagcctttactgggatccatgctggttcccaataaaaagcaccgagacctttttgtgcaataatcgcattatacatatcctcaatttcgtctacctgaccttgaggatcagcactatatcgatctatattagtagtttcattattttcaccaacggagttatgggtgccatctgcatcgttagtattatttagccatccagattccaaaatcaccgttcttttaccaaattcattccaagccattttttcaatagcttcaagatttactggtgtattagctccgtatccaagatcaacattatcataccacccattgccttgtgtggtactccagaatgggtagtacgaagttccaagataatcataatctacattatttttctttaagacattcataatcccacgatatttattaatttccggagtttctaattgaatagcaactttaatagttggatcaattctccttacagcggaggaaccagcttgaatatatttagcaacttgatcaccatcactggtttcccataatgaagcccagttacctccaccattacgtccagtgtaaaggccaaatgctccattggtaatttcattaccaatttgaaccatctttacagatgcaccagctttttgcaaatcatttaaaattttagaggtgtaaaggtaaacctcttgactcatttcaccatgagataaatttctccaagcttttggcaaaatttgctgtgctggatcagtccaaaaatcagagtattgaaaatctatcaataatttaagaccattatcagatgcttctttagccatttttatgagattttcttcattattgtctccaccagcatatggctgcccctgtgcattataaggatcattccagactcgcaatcgtacccaattgacacctgaatcctttaaaattttaaataagttcgattcttgcccattaaagtcataaaattttacaccagcatttatcagcgcttggtaactcgaaacatcaaccccacgaaccatatcatcagtcattccagggatcttttcaacctttacactatcataacgaagtcctgtgtcagtcccggtcttataagctaagtctaactgttcatctgttctttcacttgcagggaccttactctcattagagttagtaccagtttcttgaccgaatacaagtgttgcagtgtaatttacctttagctgatctccgtatttagcacccttgttaagtgcaaggaagttatttaatttgtcatcagctgattgaccttctagccagaattcataatgataagcatcattaccattatagtaattcttagtgccttctactgcagaagtattacctgcaaaagcagcaaaaattgctttaagaacctcctgactaataattgtacctttatctccttttagaagttcagcagttccattagtcaaagcatttccgagatctgcactattaactacacttcctttagttaagccattatctacgtcaacatttacgccagccttcttaaagatatctgaaatagaagcactaatcgtggaagtagcttgtggttgttcagctttttctcctggtttaaataaaataattactaacttatttttatttaggtctgccccaacaccaagcaccgagttgtctgcatttgtaaagtcataactattcataaaggtattagtaatcttttgaggatcatcatttgtaaaatcagtagaatatactactaaaaccttaccactcagtaagttattagcttgtaatttcttttcaattacatttttatcaggattagtatcaccttgagctacttcttgtgcaatatcatgaagcgctaattcttgataatcgttattggtgtttcgccaatcatatttaacacctttaataccttggttagtcaaagcctgagcaacttccttagctactgtatctctagtttgacccatatcggaagtctcggtcgcttcaccattatcattaaattcgtatcctttaccatcaatgactcttacctgattagtaaccataattccttgattatcaaagtagtataccttaccatctctatttaagaattgatcggtgtaacgagcaccatcggaaccaaagtagtaggtgtggccccaattcttgtaatattggtcttggtacataattccttgattatcaaagtagtataccttaccatctctatttaagaattgatcggtgtaacgagcaccatcggaaccaaagtagtaggtgtggccccaattcttgtaatattggtcttggtacataattccttgattatcaaagtagtataccttaccatctctatttaagaattgatcggtgtaacgagcaccatcggaaccaaagtagtaggtgtggccccaattcttgtaatattggtcttggtacataattccttgattatcaaagtagtataccttaccatctctatttaagaattgatcagtgtaacgagcaccatcggaaccaaagtagtaggtgtgaccccagttatgataaaacttattaacaactaatgatccatttccatcaaagtagaataattggttctcatttgctgttaagaattgattttttaatggaataattccttcattattaatccagtagttaatcccatttatacttttaagctggttttgaagaagcgccccatcattaccaaaatagtaagcacgaccccattttaccatgtaacggttatcccaacgggcaccatctacaccaaagtaatacgtacgaccccaattattatagaagctattatctaaacgactaccatcattttggaagtagtaagtacggccccaattattatagaaacgattatcccaacgagcaccatcggaaccgaaataatacgtacggccccaattattatagaatccattatctaacctagcaccattggcttgaaagtaatacgtacgaccccaattgttataaaattgattacgatacaagtcaccattttccccataataataggtactaccattaatctctttaaaagaattcggcgttgatttctctggaatactatctttaatatctgtattttcagctttaacgttaactggagttgtttgttcttcactattattagatttagtttgttcttgattaatctgttgacttgaatctatatttttattctcatttatctctttttcattagtactattcttgtttgtgtcagtaaaagttgactccgaattagaatcagtatcactagtattatcgttttttactaaagaattattagcatcagaagtagatgtaatagtatctgcatcagctaaaacactaggcgaaccaatagcaagtcctatccctaaaacagtagttgcgattgctgcacaacaccattttttaccatctttatataatttaaaatgcttttttatttccatgacttttccctttcaataacgttttacctaaataatataaatcatcttttaaatcatttcaatcagatacttaataaaaaagcggtactatacattttcaaattatgtataatgcaatgccacttttttattacaattattttatttataagcaactaacttattagcataatcattgatcaaagtttcgttttgttcattattgtaaatagcggtaagttcctttaatggaatagctttctcaacaaatttcgaatgagcaatatcagtagcagtagttggatctacatatttaataagcacttgcccgtcttgaatttccttaaagtagaaccaacttgttggatcacccttagcagtaatgaaactgtagccatcatttacgcccgatgtaacttttccataatacatcgtatggttactcaaacaatccttgaaccaatcagcattctgatatagaccgactaatgttccaagatattgagtataatttactctattaataccatttggaattaatgctccatcttcattaaaaagataattttgtccattaatatcttgtttaccagttacgggatatccattttcatcaaaataaattgtacttccttcatacataagccattgattgactaacatccgaccttcactatcaaaataatgaatatgagtattagaatcatctttatctaagaattggttggtgtaacgggcaccatctgcaccaaagtaataggtattgccccagttcttgtagtaacgattttgatacattactccatcgttatcaaagtaatagaccttgccatctttagtcaaaaattggtttgtataccgggcaccgtctgcgccaaagtaataggtattgccccagttcttgtagtaacgattttgatacattaccccatcgttatcgaagtaatagactttaccgtctttggttaaagattggttagtgtagcgggcaccatctgcaccaaagtaataagtattgccccagttcttgtaataacgattttgatacattaccccatcgttatcaaagtaatagactttaccgtctttggttaaaaattggttagtgtagcgggcaccatctgcaccaaaataataagtattgtcccagttcttgtagtaacgattttgatacattactccatcattatcaaagtaatagaccttgccatctttagtcaaaaattggtttgtataccgggcaccatctgcaccaaagtaataagtattgccccagttcttgtagtaacgattttgatacattactccatcattatcgaagtaatagaccttgccgtctttagtcaaaaattggttggtgtagcgagctccatctgcaccaaagtaataagtattgtcccagttcttgtagtaacgattttgatacattaccccatcgttatcgaagtaatagactttgccatctcttgtcaaaaattggttagtgtagcgagcaccatccgcaccaaagtaataggtactcccccaattatgatagaacttatttgtaattaatgaattatttgcatcaaaataataaagttgattatcatttgcagttaaaaattgattacgtaaaggaattatcccctgattatttacccagtaatctttcccattaacatttaagcttttattctttactaaggcaccatcgttaccgaagtaataggcatttccccatcgaaccatataacgattattccaacgtgcaccatcattaccaaagtagtaagtattaccccaattgttataaaaaccattatctagccgagcaccactaggttgaaaataataagtttgaccccaattactatagaaatcatttttaactagctgtccttctgaattatagtaatacgtattattatttattgttgaaaaagtattaggagctcctgtttcaggaatagtttgttgtgctacatctttattttcagttgtttcaggcttaaccggcgtctgattatcactttgagtatcagtgccagtactattattaccttgtagaggattagtattagtgggagttccagtagttaaagtatctgtagcaggtgtctcattattaggcatcatatctgcatgcgctatcgaccctagactaatacctagccctagcgaaattgtagcaatagcaactacacaccatcttttaccgtttttatacattttaaaatgttttttcattactatcctctcccaaaaagttattacttaattaagtatatacctctatataaaattattaaacctattacaactttgccgttaacttcacatcaggatacttttgcttaaaccaattttcagcaaattggttttcaaacaagaatagtggctgatcatggatatccttgactaagatgtttcgtgatgatgacatcttttcatctaattggtctggatcaatccaccgggcagtcttagttcccattggttccatgacaacctcggaattatattcattttgcatccggaacttgaatacctcaaattgcagttgaccaacagcaccgagaatataatcgccagtagaataactccggtaaagctggacagccccttcttgaactaattgattgattcccttgtggaaggacttttgtttcatcacattcttagcataaacacggacaaacagttctggcgtaaattgtggtaacttttcaaattgaatatcttttttaccattgtaaatagaatcaccaatttggaagtttccggtatcgtataaaccaataatatcaccggcaacagctgtctcaacattttcacgggtatcggccataaattcagtcacatttgataaccgcattggtttcttagtccgtgataatgttacatccatcccccgatcaaattcaccggaacaaatccggacaaaggcaattcgatcacgatggcgaggattcatgttagcctggatcttaaagacaaaaccagaaaattcgggatcaaggggcttaacaacatcctcgtcctcagttttgtgatcacttggtgcaggggcaaactgtaagtaggtttccaagaaagtctgaactccaaaattagttaaagcagatccaaagaagactggtgtttggtcccccttggcaatcttttctcggtctaattcattaccagcaacttcgactagttccatatcatccattgcatcttgccattcaccatcaccagctaatgggttatctcctttaacattaccgtcttcatctaatggtaagtaaggattattttcatcagctgggtgagtcaaggcaacacgttggttaaagcggtcatagattcccttgaactggtgaccagaaccgattggccagttgattgggtaagtttcaattcctaatacgtcttcaacttcatttaaaaggtctaatggttcgcgggcatcccggtcaaatttgttcataaaggtaaagatcggaattccccgcatcttacaaatctggaacaacttcttagtctgcggctcaatccccttcgcgctatcaataaccatcacagcggagtccaccgccattaatgtccgataagtatcttcagagaaatcttcgtgccctggagtatccaaaatattgatccgcttaccttggaaatcaaactgcataacagatgaggtaacagagatcccccgcttcttttcaatctccatccagtctgactttgcaaagttaccggtcttccgtgctttaacggtcccggcttcacgaaccactcccccaaaaagcaagagttgttcagtaatcgttgttttcccggcatccgggtgagaaataatggcaaacgtacgccgtttattaactgcttcagcaagttcttttggtgacattaaatttttcctttcctatatattatttaatttaaatctgggtaatatctctactatattattacaattttttatgaaagtctattcttagaaaaagttacagaaagtttaaagtcttacgatatatttgaacttgatattaattttctgctatattaataaagttagaacttattttattgaggtactttgtatatggataataacaataatcacgaatcacgggaacattaccgtaaacggatggaagaacgtatccaacgtgacgttaatgagcgtaaacggcgagaacgcgaagaagcacataataatcgtgaaaatcgattgcggcacgaagaagcacaatcatcaccagactttcagccaccgcaaaaacaccactaccgaactcctaattgggtacggctcctgattggtctcctaatctgccttgtggttgctggtggattttacgaatatcataaagttcactcagttgccaaaggagtgtttggcgctggtgatggtaagattagtaagaagctgcaaaaaggtgagcctgtctctgttcttacgatgggaaccgatgttggtgccctagatcggggtaacaagggtggtaataccgattcactagaattattcaccattaatccaaagaacaaaacaatcacaatgacgagtattccccgtgacattttagttcgtgtcgaaactagtgatggtccagactatgtcaaaatcaatgcggcttatgcaattaatggccctaagcaaaccgttaaacaagtatcagaactacttgatgtgccaatcgattactatgccgttatcaacatgggagttctcgaaaaagttgtaaactctgttggcggagttgaagtcaataatccatttgcctttgactatgaaggtcatcacttcaaaaaaggaaaacaacaccttaatggaacaaacgcgttgaagtactcacggatgcggtacgatgatccaaataatgactacggtcggcaaaaacggcaacaacagattctgaagagcgttatcaataaattcaaaacttccggatcaattggagcagctaataagattcttgatgctgttggggatggggttaaaactaatattccgattgacgacattgcaaccctttatggtaactaccatggagcaatgaataacgttaaaacgtaccatttccaaggtcaaaacgcaacaatcgaaggagtatccttccaaattgccagtccaaaagaaatcaaccgggtatctaaattagttcgtgcgcaactgggcttaaaagctaaaaatgttgttaatcacgaaactaagatgtacaagtcgcaaccacactacaacggatataatgaaactaacttcattcttccaggtggtgcaagttacaacgatcctggtagtggtaatggtagcgatgaggttactggctctagtcaccattcacaaactagtcaaaacgaaggagaaagtacctcagtaaacaatagcagcgaagcatacagtgaatcacaagctgttcctgctacagaaaatcatgcacaggctgctactacccaacgttactcaacaccgcaatatcacacttatcgcagttataataatggttatcattcaacctacactcacccagcatacggtaaccattatggatatacacatcgatattattaaagaaaaaatcttcgttgaaattaaatcagcgaagatttttctttactcttgttcttcctttattggatgttcaattcggtaaatatcaaagaagtattcacaaatggtcttaataaccgcatagaatggaatacaaagaatcattccaccaattccagcaatatgaccagcagcaagcaacagcataataattgttaacgggtggatttgtaatgtcttaccaataatgtttggataaacaatgtttccatctacctgttgaacaacaattacaacaatgattacccaaataattttatttggcgccattgttaatgccacaaataaggcaggtgcaatcccaatataaggcccaatgtatggaataatattagttagtccagcaacaattcctagcacgattgccaatggctggccgataattacataaccaattgatgtaaacacaccaacaaataggcactcgatcatctgtccggaaatatatgaggacaaggtggaattcatcttcccaagaagctcattcacctctttagcatgatgcggtgaaagccatttctgaatacttggaataagcttagaaccatccttaagcatgtagaatagcattacgggaacagtaatagtcacaacagtaacgtttgtcaacatcccgataatatcaccaacccgttcagatagtccttgtagaactttttgagcatagccagctaactggtgatcaaactgacggtaataagaatttaaatcaacgttctttaaaaatgagtgttgaatagtatcattaattaaatgctgtaatccggtaactgtttgcggtaaatgacgaactaaggaagatatttcctttactaccggcggaatcagcatcgttatcccccgacaataatcacaattagcaacagcacaattaataaactagctagccccttgttcatccgaaaacgaccaattttaatcttcataaaaagctttaaaaccggatttaacatataatacaagaagccagagataatcaggggaacaaaaacaactgaaataaaagttaaaaatggttgaaatacaaactggattttcgtacacatccagattaaagttgctatcgacaataacattaacggccaaaaagccaatgataaaatttttgcttagacatagatactccttaaataaaaagaatcaatatgtccattataaaagacatactgattcttttaaattataagtttaattacctgtaacagaattggcagtaacatggtaagtatgaccatttccagatacagtccaattattagtaccgttttgcgtagcagtgtaaccatctactgaatcaattgatggcaaatcatcagtagactttcctgctaccccacgatcatttaattggttaccaatatgttccttaacaatattccgcgcatcggtagcagtcattgttgactgttgggcattagagctttgttttacgcttgacttagcagaaccgccgttacttgatgtcgttgttgaagaaacagcataattagcattacttgatgagttacttgcactagaagtactattcttagaagatgcgctattttcactagtttgagaatcttcattactattacttgcagtttctttttcagaactaaccttatctttattagaatggtgcttcttagtaaccttacttgaggtaacttcagaactactatcagaattatcagaagcgctattattaccacacgcagctaaagttaacattaaggtcccagcagctaaagttgtaaataatttatttaatttcattaaacttctcctcgtttctatatcatcgctattataacagagatcattattaattacagttaactaattatatcagaattacatattgatgtagaagcttggcttaaagtattttgagtaaccgatctttacaacgtcacctggttctggggcatgaacataagtaccattaccaagagaaatagcaacgtggtatggtgcaccatcactaccaaagaataataatgaaccttttggcgcattcataacatcacgcttgtgaattcctaaagtagcttgttggtaagtagtccggtatgatgcccctaaaccataagcccattgaactaaaccagaacaatcaaaaccagctggggtgtttccaccccagacataaggaacaccgcgttgtgataacgcacgatctactttagcatcagtattattctttacggttaaaacacctgctgaatcagcatgatatttcttaccattaactgttacatcattattttgaactaaagcaccgtcattaccaaagtaatattggtggccccaattagtataaactgaattatctagacgagcgccatctttaccaaagtaataagtatgaccccagttattgtagaaactatcgtctaaacgtgacccatcagcttggaagtaataagtatgaccccaattgttgtagaaaccattatctaaacgggcgccatctttaccgaagtaataagtatgaccccaattgttatagaagccatcatttaaccgcgtaccatcggcttggaagtagtaagtatgattattttggtttaagaaataatccttttgttgttggccttgatcattaaagtaatattgtgagccgttgatgtctttaacaccagttgctttttgaccatcactgtagtaataagtgttaccattttctgtttgccaaccatttaattgagccggtgcagctgcttgaggcttaacggctacagcatcagtagcaatacttgtactggtgcttgctgactgagttacttgacttgccggttgagcaacttgactagactgagcttggttacctacctgtgatgtattatcagtagccgtactattattgatagctgtttgatcagaaacttcaacttgttgtgaagttactggtgtagttgctgcatctgttgtgtcagcattagctacactagtagttgatactccaaatgcaattgctgctgtagcgattgccatgtagcaccaatttttgcccttcttaaacattttgtagtgtttctgttctcccattattaataaatcctaccttccatttgtcatttcttttctttagataaatttaacgattattactttaccacaaataaaaggctggtaggcaaatctggctcttttgttaagcaatgataatgttcgcaatactaatgtaatgagaatgtcataatcgagtaggagataattgattagttcaattatcgacctctcacaccaccgtacgtacggttccgtatacggcggttcgacaacttaatcacattgaattgactggagcgtcttggatatattcataagtccaagacgctccagttttctattagttagagaatagctcaaggtcttactatgtgcagttcgccagtagcccttgcgggtactagcgaagacatatgcatcacgctgggacagccccaatttctgtaagttagttaccttagttttaaactttttccattgcttccagatatactgccttattcggaccctcaaccacttgtcgaggcgttgaataaagttagttagtttcccaattgagtagtactgaagccacccacgcatttttcgatgaatttcttcaaacattcttgtcagagatattccacgattacgtttagttaataacttcagcgctttctttactcgttgttgcgattgtttagctggacgggcgtaggccccattgtggtctacacccaacgaaaagccaagaaatttcaaccgtagagggctaccgactttggttttatctgggttcactttaactttcaagcgcttttctagaaactgggtaatgcttcgcattactcgttctccggctcgttgacttttaacatagatattacaatcatccgcatagcgcacaaagtgatgaccacgtctagtcaactctttgtccaactcatttagatagatgttcgccagtagtggtgacaatggccctccttgtggggttcctttttcactcttagcgaaaagcccatggtctaagactccgctagttagaaacttacgaatgagtcttagtgtccatgggtcatcaatatattgttggagatacttaatcattaagtcatgattaacgttatcaaaataggcttttaggtctaagtcgacaactcttcgatagccttgattataaagatctactacttttgcaatagcgtcatgggccccacggtggggacggaagccaaaactattatcagagaaaacacgctcaaagataggcgtaataatttgggctacagcttgttgaaccattcggtccaccacagttggtattccaagtcttcttactccaccattaggcttcggaatttctacccgtttgactggtgctggtttatacttgccctcacgcaaactagcgatcagttccatcttattttctctgagatatggcagaaggtcattgactgtcatatcgtcaatgcctgctgctcctttatttctcttaactcgcaaataagcctgattaaggttattgcgatccaagactaagtcttggatagtgacactcatacctttaacttcaccataaccggtactacgcgcccttgtgtactttcggttttccaaacctatcctcgacaagaggtcagcttgttgttctgttttctgcgatcgtcgcacctgattacacctccgatataagttacaagttattgtcgttcagtccttcatctgattactcaaactactatgacctcggctgactcctgacttactcaacgctacatcactgtaccgcttgcttctgtggaaatttatcttattcctcttgtcggaagcttgtaagtcaggcctccccgggtaagaatattagctttcgtaccatgtcatcgttagctttactgagaccaacttcgagtagtattggacttcaacttgtctagcagccttatccagttaatttcagccttatagctacttcttgttcatcgatgcagtactttgccttagacttccttcagattccacctcacggtggacacccttgtcctcagttcatggttccgactactacggcccatagcggactttcaccacctagctaatacccatgccgggcgcactagaaaagcagtccatatcaccaagagaatatgaactgctttatttttagataaaattaaagattaaaggctacgcggtcatagcgggttagatcataggtattaattacactacgtaatgaattagtatagctagatgctgttgcataaccatctgcccgaattaaataagtagctgtatttgcatcacgaaccccaattaaattatggtaacggctattcttaactaagaagtcagtatggtcctgaacactagcattattatctggatagcgacggaaagcatcattaattaagaccatccgtccaccgtactcttcataggttggcatattaactgacatacctttatagctccccttaataccaaacaaattgtggtattgtgaagcaagcgaagacttaccccatgcgctttcaagaattgcttgagcaagtgttaatgacggcaagatttgatgttgtgtccatccttgaatagcaccattgacgatactgccaataaaagcattattagaggttaaacgtccttgactatcaaagtcaagattaccataacctaaattaatagattgaccttgaagcaatgccccatctttgccaaagtaatatacattaccccaattgttcataaaacgattgtcccagcgagcgccatcactaccaaagtaataggtatgaccccaattattataaaaactattatctagacgagcaccatctttaccgaagtaataagtatgaccccaattattgtagaagccattatctaagcgagcgccatctttaccgaagtaataagtatgaccccagttattatagaagccatcatctaaacgggcaccgtctttgccaaaataataggtatgaccccagttgttatagaaaccatcatctaaacgagatccatccttttggaaatagtaggtgtgaccccagttgttatagaagccatcgtttaaacgcgtaccatcagcttgaaagtagtaagtatgattagcttgattcaaaaaatagttcttttgttgctggccttgatcattaaagtagtagtctttaccgtcaatactttgttgaccagttactttttgaccatccttgtaatagtaattattaccattatctttttgccaaccattttgagaagccgctgcctgtggagctaccgcaaccttactttcacttaaagttgcttgaacattgttatcttttgctggttgattaatagtttggtcagcttgtgtattattattgttattcgtcgatgcttgtgctcctgcttgatcagtagccacattatttggtgttgaaggtgttgttaatgatactgtattggtaacttgacttagtgcatctgctgaagcattacttacactttcagtatcattggctgtagtatctgcattaacactttgagaaacagatagcgtaccaacagctactgaaagcgtggcaattgccatgtagcaccagttttttccctttttaaacattttataatgtttatgaacactcattgacttatttaccccttttttatttttaacattatctatcctatcacatgtttttaaataagttctcattctattaaattgttactaaaggataatttttgaaatatttttgtaacttaaaagcgttgattaatataatcaacgccctatcatattattagcttaatttagaatactcataatttactaattgtagaaaatcattcatattatacccagtaccaaaataactgctagctcgattactccagtaaccatctggatcagtatgattagtattacctaagtattggctaacattatggtgtgaccaaagagttcctgttccattggactgagctaatgatggtgtcaatccgtacttgcgcatgttgtatgccgtgtagtaagcagcattaactaattcacgagcaaaattccaggcaccataaacttcaacctgttcaaattgaacagcacgaccgttggcaggatatgcagctccccatgcttcatgatcggtatcggaaatttgaataatgttattagcatcaacaaatgcatgaacaaacgcactattataatgctgcttttcgtaattaatttcaccccaaatactatcattgggattatcggtttcatgtactactaccatattaggcttaccgtctgtcgttccggagtatgaatggctacttacatcaggaattgcattaacatatgaaatattagcatgaccaataccattattcataatgtaactattaatcttattattgtaaactgagattggtaaaagaatcccactgttatcggcacgatagaagcttccattaacccaaattcctgtgccttgtactagggctccatcattaccaaagtagtaagtatgaccccaattgttataaaagccattatctaaacgagaaccatctttttggaagtaataagtatggccccaattattatagaagccatcgtctaaccgaacaccaccttgaccaaagtagtatgtgtgaccccaattgttataaaagccattatctaaacgagaaccatctttttggaagtaataagtatggccccaattattatagaagccatcgtctaaccgaacaccaccttgaccaaagtagtatgtgtgaccccaattgttataaaagccattatctaaacgagaaccatcttttggaagtaataagtatggccccaattattatagaagccatcgtctaaccgaacaccaccttgaccaaagtagtatgtgtgaccccaattgttataaaagccattatctaaacgagaaccatctttttggaagtaataagtatggccccaattattatagaagccatcatccaaccgggtaccatctgcttggaagtaataagtatggttagcttggtttaagaaatagttcttttgttgctgaccttgggcattaaagtaataattcttaccgttaatggtttgttgaccagttaccttttgaccatctttatagtagtaactactccctttatctgtttgccaaccattctgtagagcggctgcttgcggagccacagcactcttatttgtggctgaagattgttgatcagtttgagtagttgaattagcctgatcatcttgcttagccgtttcacttgtactttgcgttgcaggtgttacttccgcagcaacatcagtcgtttggtcctgtgccttttgtgaagctactataacactggtggtattgactgtactatcagcacttacccctgtgaaactgataaagcaccaactgctactaccaatgtggcaattgccatgtaacaccagttctttcccttcttatacatcttataatgtttatggatactcattgatgtgtacctcccctttttatttataatattatctatcctaccataattacaatttttaaaatttcatttttttagaataattttcatatcttatgtgaaatctaggtctcatctttacctctgtaaagattttacctatatactcacctaagacacttagtgaaagaagctgcactccccctaaaagccaaatcgatatcattaatgaggaccagccagaggtcgttccccgctaaacttctgaactaacgtataaatcataagaacaatacttacaataattactaatattccaagattcattatcaactttattggtgttgtagaaaaagaagtaattccgtcaaaagcaaaatgtatcattttctttaatggatattttgacttaccagcaaatctcttctttctcttataaaaaactttagctgattgataaccaataagaggaaccatcccccttaagaatagattccgctctttatattccaacaaagctaaaacagctttcttactcatcaatctataatcagcagaattgggtactaactgtactcctagttttcgcattagtgcatagaaagccaaggccgtgttcttcttaaagaaagtatccgtttcacggctgctgcgaacaccataaacaatttcatttccttgatgatatttatcaatcatttcatacattgcattaacatcatcttgtaaatccgcatcaatagtaatcattatatctgaatattttgaagcaatgcttagacctgctagtagtgcattttggtggccataattacgcgtaaaagtaatcccagtaacatatgaataatgtttactatagtcctcaattagtgtccacgtattatcgctgcttccatcatccacaaataatattttgcttttagcagagacctttcccccatcgattaagtcatttaaaatcttaccgacttcttttcgtgtttccggtaaaacttcttgttcgttgaaacacggaataataatcgttaatatatcattcattagttttcccctatactttaactttttgttctattgaattaaactagtaatttttcacattgtttctctaggatcttaagattttttcatagaattgattcagctcttttaattgacttctaagcctctttaacttgctaaaaaataacgtttaatgggcctcaactaaatttgctaaaaagctagatactatatcaaataattttccaaatagctttctaataagaaaatcaattataatacataccgtaaaaaccaaaaaagacactattaatgcatttcctaaatagctaagccaattatttgcaaagcaatttgaattagcaatatgctgccatagaataggacggataaacgagtcctcgctgatcaagtataccccaaacattgacaaactaatctcattaatcactttgctataaaattcaaaccttgtgaaaaaaataaatatagaaattgccaagaaaaggtcaatcggattatagagtaatacaaaaatattataatgattatacaaaaaactgttttgagtacacaaatacatccacagtactactattattattcctataattagcatcttccagagattattacctccatataaaaattctagtccgtgtctttgaatgattccaccaattaaatataataacaagaaataggctcctgctgaattaccgaaaacatcatacgtaaaatcgggtttccctggaaaaataaatccgagagtcggcaatactgaccaaaaaagcactagtatcataaacgtatttagcaacattttcatactaaatttttgtaatattaggttcattgccggcatacatagtaacataaatatatatgctccaacaaaccaatatccacttggcaaaggaattggcaaaagtaattgtgatactgtttcatctacagacttaggaaatagaagttttagtaaaccgaatatcaaaaagctataaaatacagttattgttactaacttaatcggtcgcctaacactataacttttctgagacagaaaatatgcacctagaattacaaataaatctacccctaacttcccaaacaacaaaattatcatatttattcttaaagtcggtaggtttgctatagaatactgatgccaattaaaagtcccatgataggcataatgatgtagcacaattgcaaacatactaataattcttagtaattcaaaactagagtttcttcgcactttcatatagaactctccctacattttatcctttaaaataatacgttgtataatatctgcccgtttgtattgttttataagaagctttgtccatttttataccattttgaactatatatacccctctttttttactcttcaattttctattgatcggcaaatcaacaatattccattttccaaagtgattataagtcataaattctgatggctgagcatatagagtctctctatgaaattcataaggattaatttgttggtagaaaataggtaaaacaaaataggataatgaattcgtttgtctaatatcatggctagaaactaaaaatacattattataagacgcagcatgatgtatcatttcttttaattcacttggtgttgtattttcatagttgttgtaagttccgttattataatcattaacataagatttagcggcacccaaaaagaaaagagtaaatattaccatgaaagtaattaaactttggtaattatcaaatgcttccattattccccttgcctcaaagtaaagaattggaactataattgcattaaaatgcgtaaaattaggctgtatcaaaagtaagttccataaagctgaaattagcattatgaacataaaagtatcaagtaccgacttttctttaacaatataggtaataataccgatgcaacaaaaagaaagcattaatggtaaaaaagctccaaaaaattgtggagttattttaggaatcccgtcataaccattaattagcattttgatagaatttgttaggttattaataatgcttgttaataagtgcctattctcaatagcaaaagctgatcgagaagtggctaacttagtagctgtaaatcctccaaagaaaatttcccttttactaataaagttaacatagaggaaaagaattaatggaaggcattctattaataaaataataaatgagactagcacttgtttaatgtcaatctttccttttagaagaagccatgtataaaagcaaatagcaaaagaaaataaaaaaatccaattattagaataacaataagctaataatccaataaaaatcgttatagtaatcaaataagcatttcttgcgtacttactagtcgttgatataaatagaataaataaacttaatataactacgactagcggaataaacaaattactctcaatagcccatctgctagcacatatagttaccggacttagaaaaataactatcaatagcattaatctttgaatatttttaagtattcgtgtcttatataacgaatatgttagaagcaggattgagactaaattaataataattaatggtagtcgatacgtagtaatcgttaatcctaaaattttaacaaatggtactgaaattaagggatataagatattcattccagaaccccaggcatatagataaactggatttttcactaaatgaaaataatcaacaccatactttcccaacgaccaagagttaattcctcccattgcttcatcaagatccaaattaggaagcttatcaaatttataaattctaaccataaatgccaaaattaaaaataccaatagaaatattttatatttgatacttacttttcttattgtatcgttctttcttataaacacagctataaccaaaaaatatactattgtaatagtgaaatatattatctgcattacattgatcctttatttatctgccttaactactatccaattaataattgagtggaatataactaattaattcaattggcaatcactccacactattatacgtacagttcgccagtagttcttacacatactagcaaagatatatgcatcgcaataaaacaaaactaacttttgtaggtaacgtcattaagttagtgttttaatacttaatgtttgattttctctctgtattttgaaatattttagttaacttaaaaaccatctaattggcaattccctgattgttaattaggtggttttgtctatttaataaattgttatagcacttccattgtattcagaagcaacgctcccccacgaacgccaactatctgctcctgtatcataagcatttcctcccattgaatgcgcaccttgccctctgccccagtaacatggatccaatacgtggaaatagccattagactcaccaattataacttttgcatgattacgatttccatacatccgttcaaaggaagaaaatccataatataataccggatgaccagtggcaactatagaagcaatttgagataagtccttaccagaaatatcacgtacactactatctatatttttatatgcccaccatgctaatgctcctgctggaatgatacctgaaaaggcaccagtgttatacacaccgccagactgtggtacatggttataggcatatcctagattaaaaaacttacctttagtacttaataacattgccaatgcagctactgagcatccttccggtgcattgattggtgtaaattgactaaagtattgagctgtgcgcaaggaaccgtcagattgagcataccaatcttgtgagttaagaaatacataaccatttctcagcaaagcaccgtcatttccaaaccaatatgtatggccccaattactatatgtttggttagtataacgggcaccatcatttccaaaataataagtattaccccaattattataaaagcgattatcccaacgggcaccatctccaccaaagtagtatgtgtgaccccaattgttataaaagccattatctaaacgagaaccatctttttggaagtaataagtatggccccaattattatagaagccatcgtctaaccgaacaccaccttgaccaaagtagtatgtgtgaccccaattgttataaaagccattatctaaacgagaaccatctttttggaagtaataagtatggccccaattattatagaagccatcatccaaccgggtaccatctgcttggaagtaataagtatggttagcttggtttaagaaatagttcttttgttgctgaccttgggcattaaagtaataattcttaccgttaatggtttgttgaccagttaccttttgaccatctttatagtagtaactactccctttatctgtttgccaaccattctgtagagcggctgcttgcggagccacagcactcttatttgtggctgaagattgttgatcagtttgagtagttgaattagcctgatcatcttgcttagccgtttcacttgtactttgcgttgcaggtgttacttccgcagcaacatcagtcgtttggtcctgtaccttttgtgaagctactataacactggtggtattgactgtactatcagcacttaccccctgtgaaactgataaagcaccaactgctactaccaatgtggcaattgccatgtaacaccagttctttcccttcttatacatcttataatgtttatggatactcattgatgtgtacctccctttttatttacagaattacctaccctaacataactacaacttcttaaatattttagaatgttttagaaaccccattttttaccttcccaatttcattttctattcaataatagcaaattctttgtaaattagaaatgctcaattaaaaaaacttacgtacttcttgcaatctaaattcaaattcccttctctcctgccgttgaatagcatctagtgttaatccactgtaaaaagagattatagctgctattgcgcaaaagccacatataataagtgtcggcatgtttgcaacaactccagtcatcctatatggaatccatacacgtggaataaatactgctatcgatatgatcatcagtattaacgatagtataccgtagaaattaaagggcttatgattccggtataaagtaaatattaacctaagaaccctaaatccatcggaaaaagtatttagctttgagacgcttcccataggccgatcacgataatcaattacatagtttttaattgccatattattcactatagcaaaaatactcatttctgtttcaatttcaaatccacgtgataacactggataagtcttgacaaactccaaactaaaagcccgatatccagtcataatatccttgatatcatttttaaagaaaaaattaatactccatcgtactagtttattaccgatcccatgaaaagctcgcttattttcagtaaaatagctagaactaaggcgatcaccaattaccatatcatatttatcttttaaaatgtaattagccattttaggtatttcttcagctggatatgtatcatcaccatcaatcataatatagcattcagcattaacttcgcgaaacattctcctaataacgtttcctttaccttgtttatgttcataacgaacaattgccccagctttttttgcaagttctgccgtattgtctgtagaattattatcatatacgtaaactttagaattaggaattgacgaaacacttttcaggcaatcttcaacaactttttttattgtttttgattcgttgaaacagggaattaatatagcaattctatccacttaacattcatccttccttacatttcttatatagtaaatattatttttaaatatctcaactatattcacaaatccaattcctgctaaagtagtaatgaatgggagaaattgaattaggtatctacttcttccgccttcaaataaaagcaaaaatatcattccgccacttactacatactttaataactgtacttctatttgcgaattcggtaaagtagctaaaatacacaatagtacaactatccatagactttgtacaattaaactattcccagaccaatcctttcctgaagtatccgaaacgtatgttttttgaatttttgctatcaaaggattcttagaattcgaatatggtatcaaaaagccaacttcgccaccatcatttcgccaaccaaaagtagcatcagacgtattagaaatttgtttattgaataaaaacttagtatagccgagcacttgtttctcgtgcaatctttcttttataaggttaatgttcatttgatttcttttactttgatctttaattttttcattaagcaaaacatcctgttcattatatcctccaccttgtgctagtcccattgccatatagtgtgtaagagtcatggctctttccttttcaacttttacaagactggtatgagaagctgcactgttgaacacaggaattataattaacggtaaaattacgaaaataattaaaataaaaaaatgctttttgctgatttttctattcgtcatctcaacaaatcccattaatatccaagcaaccatatataccatcaaactcggttttactaaataggaaatagctaataatgtcccaagcccaaggcatagataaccttttttaccaaaattagatgttcttataacacgataacccattgctagggtaatagtactaaaaaataaggcccaaatatcactatatggtattgctattagtggagaaataactattaaagtccaaaagaaaaaagctgagactacagatatttttttgccaaatgttttttttagcgaagagaataaaataagtaatgacgtatccaataacagcaagtttataatattaagaatcttagttagtgttattaatctagggtgccctgcaactatataaacaaaatgctcaaaaaacagcaataataacgtatttggataaaaagaaaaatagtcttttacccaataactatgaccagcagctgctctcactattatagaaggatcccatgtagtacttccagctagcgacatcacaatcataaattgccaaagaatcgtaactagaaaaaatagaactagaaaaacgcgtttattcaatactataaattttcttattttctttgccaaataaacgctctttccccaatatgtacctataaaagctatcagcattatcaaaacgatactgatcaacactattagtttagaggatcttccaataatagtcggtaaaaccacaatggcacctattatagatactacaactaaaattactagaaagaaattaattattagattacttaatcgaattagcttcatgctcttccctccatcattttttgactctctgatatcataattccaacacataatggaacaactgaaacaatcgggaaagcatatctatataaaacaacagggcctagtaaaaatgttcctagtaggcttaaagttaaaactattaggaaaatatattttctttccttaaaaataatcatccacgctgtaaagaataataagataaaaacattaaaaccaatgctatcaatcatcgatattacaggaatacgctggtttggataactattaacaaaattagtatagaatttatataacggttttaaggctttaggtgttgctactctttcatgatgccatgctttctcatttttgtgttcttgcttaacgtacgatgaatattctaagaaatacttgtaatagcttcttcgatccggataagaggtatctgggtaccaataaccaatagtcatcttagcaaaagcattcaaatattcattaggattttgttttgctaatttgaaccataatttccaaaaattctgtttgttttttatatactggtcggaattaaaactagacttaagtggatcagataaagactgacaattttgagattcatacattttataatttggaatataaattctaacttgatttacctcatctgaagtaatatccaaatttttttgtgacgcaacacttgaaagctgcataattggaatgctcaaagattcacgtaccctatcctctttatctatatgcccatttagacttcttgtcacggggccattatagataactgttccaaaaagaattgcaatacaacttaatagcagctcttttcgaatacttttttggaaaagaaatgcgaaaacaagagaaagcgtgataacatatacgccttgattttcaaatattaaattaatgagagcaaataaaacaaaaatggtccaatactttaactttccgaactttaataaccaattttttctttctaaataccacaggactagaataataaaactagctgtataaggtacattttttgttacagaaatcgacattatgcctatatatggtgaaaggcaaaaaattacaaaaaaacatatacgaatagcatagtttaaatttatttttcgtagatattctaatactcgagaataagcaaacgagagccataagatttgtaaaaacgtataaataaacagtccttgtgtctcgccacctaaaatatttctaccaatttttaatacaaagaaaattagtagttccgtatgtgcaagtggatgatgaagataaatttctctagtatttagataactttgtaattggtatcccgcatcataggcgtaattacctggataggtagcaaatagttctattagccaaaatattatcataccgaaccaaagcaacttccacgtttccctgcaattgaagaatctttgaagggcattattagtagagaaaatagaattgagctgcggaagagaaagatatatataattaactattacaaacaaaagaggtaaattccctatcacctttatccatgtctttaacgacatgaaattcacattattataccgatataaatttactccaataactagtaatattgaataaatagttgccaaacataaaagaacgaatattgatcttcttgaattttttaaaaaatcagttgaactatacaatttgtaaattacaacaaatagtaaaacggaactccaactatttgtatatgataaaccttgattaggatctttaattaagtattgaaaaaacacaactgcttcaaaagaaagaataaaagctaacaatttatacagactttttctattttcttctatcatttttcttcctttcttttttaactaagaaagtctttaattcactaaaagggtgttgccgatgcatataaaatgatcttaaaaaaggtatgtacggcatcattaacgcaataatcgacacaaataatattcggtatacaacaccaaaagcaatggctggtaaatagccgaaatgattatttaccatttgaataaccttaggccataattgtacataatcaagatcaattaagtggaaacataataaaataagagactgttctccaaaaaataaaaagatcctttcaaacacctctattacactagcagttaagttttctatatacatactaaacttcataactactatacttgacgttatcccaactggaagcgcaatataaatattcgttgcattgaccccttcaaaatcaaataggttaaaaaatgcatcccaaatccacaataatagcagcataactattactaaccaattcaccttggatagaatattatacttttttatcaaataacctgacatgagaaagcactgagctattaacgcaggttgtactgaaaacggcaaaaagaaatatttagctgtttgaacacctaccaaagttaataatattattaccataactttgtatcgtacttttattttgagtttcataatcaaattaaaaatttgattagcaatgaacattgccattaaaaaccaaatagcacctatagcttttatttttatagatgtatctggaataaagacatctccacctgctccataaatagcagagaagaaaaagtctctaaatgatgaacccctactaggcgcaattatactgttaggaaccattctgtaaaggaacaataagataaatccaatcgcaactgttgcaatgtaaggcattaataggttaaaaaaattctttttttctagtgttttctgattttgctcatgatataaatatccacttaggataaaaaaaattggcatatgaaaggcaaaaaggaaattacccaaatatccaggccaatagttgcctaacgaatgtcccgcaacaactgcaataatagcaattcctcttgcaatatcaatccatgcaattcgtttattttttgtattggttttcatctatcttaaaatccatttccttttaaatttagtttcctccagaagaaagcgaaaaatgaaggaaagtaatagttaagccaataaattattttatctcggctaggtaaaatatcattctttaaaaagtcataacgatactttttttgattgtttctcaactcatccatcaatttgggagaaatttcttttttattaggagctaaataaatatttctgagaatagaggttgaactccatagaattgatgcattaatggcactcactactttaggataattcattggctcaacaataagttttattaaactataagtttttaaaacatctaaggattcttttttaaaatcactaccgtacttattagaattaatttggctatcagaattaactatataatgatatttcacttcaggatttaagctaatacggctacaatgagataaatatttacaacagaatagtaaatcttcagcaatcttaatcccattatcaaagctaattttattctctcttataatggataatttaaaaagtttattccataagtatccttcatagccggtactaataaaaatatcatgtaatgcttcttcacgacttaagttttgctttgtacctaatcctttaaaacgaactatcccatttttttcttctttgcagtatccaacaattgataaatcacactgttgtttcttatattgatccaacaataattccaagtagtccttttcgacatagtcatccgcatctataaaagtcacatattccgaatttgccaattcaagacctcgattgcgcgtatctgaagcaccagtattagatttattaactacctctactctgttatcatctttatattctaacaacttatttaacgtaccgtctgttgaaccatcgtttaatacgattattcgatatttttcttcagtggtttgattaagtaagctataaaggcaacgatcaatcgtatttattgcattaaatgccggaataataatgttaattttctcttccatctgttcttctctcttttaatattttcttaacttgatttactattggtgcacgtaaagcaattatacaaatgatataaatcaaggcacccaaagcaacctgtaatattaagttagctattgtcatattcataatattatcaattcttgatacaactaaatacataaaaaatccacttaaaatatatcgccatataggcgcaaataaccgtctacgtcgtattgttccttgaatataccatagctgaacggctgttactgaaaattcagaaattacagtagctactgccgcaccatttgcaccgtatcttgaaattaaaaagaggtttgtaataatattgactaccgctccaacagttactgaaatagtaaattcgtgttcacgatgaattggcattaaatattgggttcccgtaacattactccacgcaatcatcaaaatagcaggtgcttctaaaaagattacacccccagtcggctcgtactcatgtcctaaaaaccaaggtgcaaatttataggcaatcgccattaaaccaaacatcatcggaactgaaacagcagttacaaagtcaaatgatttatataaactatctctaacccctttaacatccccagaagcaaacttatttgcgatgtgagggagcattacagttcccgttgcagtaactattgctaagaccaatttcacaatattatctccaaaattaaattgcgaaaccgctgcttgcggtgccatgcgccctagcataatccgattaaccactaagtatatttgagtagtgattgttggaatgaataataacaaagctggataaaaatgttttaacggatgccattctttaatttttacccattgaatattttgtcgtaagtatggccataatgtaagactacccgctaattgagcaaatcctaataggaagatatatttcgctaaatcgccttgattacgaaccataataaaaatcaaggcaatcgtaattaatttaacaattgtatttctggaaacagttttcttgaaatcttccattcccataaaataccacgaaacatcaatcccgtaagcaacaatccataaagcttgtaagagaaaataaaccttaaatgcgctactgaataataaaaccgccaataagtatattattagtgcaattgaactggtaaaaatctgaagagacattatcccccaaaaagtttttgaccgattatatttatctcctcgttgataggctatttctcggttaccatacaatgaaattccaagttgtccggcaagatagaaaaaagttacccatccattcgtataagtgttaattccgttattatttgcgcctaatacccgtgatacatatggagtggtaatcactggtgccaacattaataatatttggtatcccgcattatataaatagtttttaatgaccttcatacaataacctcgtctatcctttcaaactaaaaactaattttaccactgtcctcttataaacaaaaggtaaccttaatcaatattaaaaacgacgagttaagttttcccactcaactcgtcatcaggatttattcaaattctttattaacagccgtcaatgctgcatgcaacacctgatccatgttgtaataacggtattggcctaaccgaccaccaaaaataacattatcagccttttcatcagctaacttggtatattgcttgtaaagatcgttattccgttgattgttaatcggatagtatggttcatcaccacggtgccagtcagcagggtattcacgagtgatgatcgttttatccttatcacccttgccgaactcaaagtgtttatgttcaataatccgtgtgtatggtgtttcggcatcggtatagttaattaccgcgttaccttgatagttatcaacattcttttcttcagtctcaaaacgtaaacttcggtactgtaactcacccaattgataatcaaagaactggtcaatcatcccagtaaatactattttcggataatcttcaaggtacttagccttttgatcaaagaagtcaacaccagtctcaacatcaattaagtcactatcaagcatcttctcaacgatctgagtgtaacctccaattggaatcccttggtaggtatcattaaagtagttgttatcatagaccaaacggactggcaggcgtcgaatgataaaagctggcaactcggtagccttttgtccccattgcttttcggtatagcctttgatcaacttttcatagatatcacgaccaataagtgaaatagcttgttcttcaaggttctttggttccttgccagccattgcttgtcgttgctcattaatcttagccattgcttcttctggcgtacgaactccccacatttcactgaacgtattcatattaaatggcaggttatacatatgccccttgtagttagccacaggactattcgtatagcggttaaattccgcaaattgattaacgtattcccaaacttctttattagatgtatggaaaatatgggcaccatattggtggacttgaattccgtctacttcctttgtatagatattaccagcgatgtgatcgcgcttttcaattaccttaacgcgcttacctcgcttagcagcttcgtaggcaaaagtagcaccaaaaagtccagcacctactactagatagtcataattattcatattcctacgacccaactttcataattttttctactgctttattaaaatttaataaatacacctcaggcataaatttttttgaagttttttgaatcattaatggtgtaggcatttttttattatcaataattttttgtattatttttgttaattttttactattccctgatggataaagttctccattataattattaattatatcttcagggcctgtactaatatcagcactaatgcaataaactccgtgagagatagcttcgcaaagaaccattggtaatccttcatatttagaagttaatattagtgcagttgctctatttattacagaccatggctttttaacaaagccatgccatattatatttttatctactcccaattttcttgcatactcttttactggcgtcgcttgagcagtattcccatatatatctagttttagctccccttttacaccagataatgcatttaataattctcgtaaatttttttggccatctagcattactctaccaatataaagaaaatgtggagtgctttgtggcctgttaatcaaacgtaaattagttgttatcggattaaaaattaagaaaatcctatttgaactaattccacgttttttaagctgttcttttatcccagaactaatagctaaatagtaatctgcagagtttaaaaatatatgcttaataggcttttgatcaatcgaatagtgataccaggcaatcacaggtgtcttcctttttaatagctttaaactctttttggctaaataccaaatcactggattagttgatataacaaaatcaggattttcttttctcaaatagttaaagatattaagcggcataatcgttaacgcatataaatcacgtaaaaatcttcgcttactaatccacttaatatctatttttacgttttctgcccagctataatcaaagcttccaccaatagagtatacttttaactcaaaagcttgttctgacattaaacgtgccttaaacaaattttttataaccgtttctgttccaccaaatccagtcataaatggtacaattatgatcccttttttcataaaaattccctttaccaaataattgcttcgatgtttgcaatagctttttttatatgattaccatttcttaaatcatttgaaaaagataacgcatttttcttgactaaactaaaatcactctgggttatactacttaataaccctggtaattcataaaggctactaatagtatatcctagcttatttttagaaataatgcttgctatcgcagctttattccaaacaataattggaatacccgtacttaaataaagtgatgccttatgtggacaattatactgtaaatattcaccatacattccattgcactcttcagcactagagccatcccaaatcaaaccaaagttttctgttaaatgggcaggcaattcttcaggagaataaactcccttatatttaacatcgttatccgtcactccactaaaatttggtccataaacatccaatgaaatctttgctggaactttagacaaaaattgagccttttttaaatttccagcaaaacaaagtgtctttgtatattgataattattgttaacagattgaggatttaaataatcaaataatcctaatataaccatcggagttgtaattccattatctttaatccactttgccattgtattattatgaactatcaggccatcaacttgttttaaccaattaatttcctccggtttatacgttggatcatccttataagatcttagagattctaaatcatgaataatcaaaattaattttgcctttgtataagcacgaatatctctaataaacgcattcattaaggctcgtgaataggttggaaattgaaagaaaatttcatctgcttgtaaatttttcattaatctaggaatattccaattgatatatttaaattttaataattttgaatgccagttaaatcttaaattaattacttgaaatccctcttttttttaaaatcttatcaatatctgttttagctttaggaccagcattatttttatcaatttcattaacagaaataattactctctttttttcattaggcacttttttgaacctactttcattttgaattaaattctttagacgtaataaaaacaaaggaaataattaaaccaactaagccccccaaggcaactccgacagctacatgcttttttattgaaggagatgtcttacttgaagtatcacttttcgttgctttatcaacaattcttacattttctacacctggctgtaccttaggcaattctttgacaaaggctttagcagatgcatttgcgattgttacagaatcttctttggattttgtagttgcttctaatgtaagtactaatgattgtggttgagttttagcatcaatcgcactatttatatcattttgtgaataatcttttttcatttttgaagaaagatactgccgagcttctttagaaacagtcatattctttgcaatttcttcatatgttggcatcatatttaaatctgcattgacaatattgtcctgactcttattatcattaatctttaagtcatgggaaatgacaatattagttttagcagtatacgttgttgattgatgtctttttgcacgaatccccattattcctcctccaaggatcgccaaaactataattataagtaaactcttccaaaaatttctatataaagtttcagatttcacgattttcctccaataatgttcttagacttgtcttttgcataaacctctgctaatagcgcgatcaaaaacggatcataactaacatcaagaagcctttgttctacaactgcgctaatggatataactactaaaactgtcgcaagagcatatttctcattgctaattgaccgaaacgagataaacgtcattattcctaaaacaattaaaagtgcaattattccatataaaatcataatccgaatatatgatgagtcaataaaaaaatatttactttgatttgtcataaacattctcatcccagttgttcctccccaactgtgttcaaccatatgttgcccaaagatggaaaaaccatactgctcaaatcccttttttccaagagctaacctaccggataataagctatttatcttttctagaattaaattagatttattgtagaagtaggttattaaaaaaattatatatgctgataatattggaactgaccagtagtaattagctatcttttttgcaaacttctttcctcgttgtgacgctttacctattatcataacaggaattaataataggagtgatacggcacttaaacgagcatcacaaaagtaaataagtagatatgcaagtaaacaaaatacaaaatagctttttattgatattttctcaaagaataaataacagtatgctaaaacaaaatataaaacatgtgcagcaaagtctgttgggtaaacaacaccaaatgattgtctaattgttccagtggtttgtcctctgcgataaaccaaattctgaattacaccggttaatgagctgaatacagcaagtgttaatataattattcctacataaaagtacaaataaataattctatcaaagtttactcctctagcaccaagaataaaaattcccattgaaaatagcataaaatctgaggaagttcgccatgtaagtactaaaaagcctaaaacaaatatatctataaggaaattttttattgtttgttgatcaataaaaaataatttaaaaattatcatccccaatgcaatatacgaaaacatatgaaacgtatttttagcgaaaaaatccataaaagttgtaaattgtaagaaaaaatcagtgaaataaaatacaaatgcaacttcataaattaattggccatttatatagaatttatttatttttaaattattcactcaattatggtctcctctcctaatacgcgccatcacgcttaaaaatactaataatgttcttaaacattatctttgtatcaaaagcaagtgaagccttatcaacatactctaactcgacatcacagcgttctggatatggaatgttgctccgaccactcgattgccacaatcccattgcacctggttttactgataaaaacttatcaacccgatcaccatattcttcaagttctttttttacaataggtcgggggccaataatgctcatctcgccacgcaagatattgataaactgtggaatttcatcaattgatgtttttcgtaaccaccgacctaaacgggtaatccgtgggtcttcttctggctccagtttatagttattggcaacatatttagcatacatttctggatcattttctaaaatcttatccgcattcacaatcattgaccgaaacttataaatcttaaatggtttgccatgccaaccaattcgttcctgcttataaaataatggacctttgttatcaccaaaccgattcattataaaaatagtcagaaagactggactaaaaccaatcattgctaatgacgacagcgtaatatcaaagaaccttttccagaaaaggtatccctttgattgttgtttaatttttaccttctcattcatgattctcaaccctactttttctctttaataatatatattggccgtttcttggtctgcatatagatccgaccaatataacgacctactattccgaggcaaagtaactggataccacccaggaataaaataatacaaaccattgaagcccagccaaaagcactactagcaggctcaataatctttcttattataacaataatcatcccgataatggagataaatgccgttaatccgccagcccaggtagcaattgctaagggagcttctgaaaaatcggtaatgccgtcaatcgcatacttaaataacttccaggtcgaccaatctgttgttccagccacccgttcgacatttttatagggaaggtacttggtcttaaacccaacccagttaaaaataccttttgagaaccggttatattcagttaatgacaacaccgcatcgaccatctggcgggtcatcattcggtagtcacgggttccagagacaattttagtatcagaaattttattgataacattataaaactggttagaaaggaaggacttaaactttgcctcaccttttcgatctgtccgccgcatccccacgcaatcatattcacccttagaaatatcctgatacatctctggtaaatactctggcgggtcttgtaaatcagcgtccatcacaacgacataatcacctgttgcgacctgtaagccggcataaagccctgcttctttaccaaaattccgtgaaaaagaaacataatgaacccgttctggatcttgtgcgtgcagcttgcgtagttctgctaaagtgtcatcactcgatccatcattgacaaaccaatattccgtttctactggcatctgtttaactactttttcaactgctgggtaaaaaagtggaatagtttcttcctcattataacaaggaacaactattgacaattttggcattcttgtctctccaatcgttaatgttcaccatgaccggtgactttacgttttaagaacttcacaatctttaatggccagttttgcttttcaagaaatacccggttaacttccactgtcttgtattgcggattagtcaacaaccaagtatctagtaaaagctcactcaaaaagccaaagacccgttgctcatatggtgtgtagtcagaataatcaacttttttctcaacttcgcctaaaacatcaaacagccaggtacaatattcatccaacggctgcttcttcataatcatcatgttgaaataatgagccgatgtctgtttcattactttttcaaaagcaggtaagtagtggggatatttatcctttaacacctgccgcgtaatttcaagcggctcgtgctcatgaacatggaggtaatgggattcatttgtttcaatgtaatagtgccgcttctttggcaagattacatcggcatcttttaataactcttcaacttgtccatgattgaggatggtcgaaagatcctttgagtgtcccagcgtcaagtaacgacggtagtggactaatcctaatgcatccacatcatcaagatttttccatccccagtacaaagctgttagctcattgtaatgcggattcttttttgaaatattatctccggtattatcaccctgaaatgtatgattaacagtcgggtgaatctctttaccaacaaaaactggtaaatacattggatcatctggcatccgataatttttatggacagccactaagattttaatattcactattgtactcctaattattgtttttaaacataatcattaaaataataccagtaattcccaatcttggaaagttattattggaaatcctgcgcagctagccagctctgcacgtcatccagatcaaagcccttgcgatacattgtctgcttaaaatgctgctcacgctcgtatccttgataacggagagcacgacgccattgcttcgctgcttcttttgctaaaaggtcgttctcttgctccagatcaggttgtggaacaacttcatccttaatcatttcatacacactactagagaagccttttgtcatgagcccctgttgtaccttttgttctcgtcgccgctctggctggttccgataacggcgaaatagttttacagctaacttctttgctaattctgcttgaacttcgggagtaaattgcgttaaagcatcatcaatatcgttttcgccaatccctttttgtcgtaagtgttgacgaattaccccaggccccttcaagtccgtgttaatcatcgtgcggacataagaagccgcataggcatgatcatcgattaactgttgaccccgcagctttttcaagattggctcaacaaactcttctggcgtatcaatttcttttagcttcttaacgatgtcgctttccgtccgcatctgataagaaaggtagtcaagcattcgtgaataagcctttgcttgctggtcagcagtcgcaatggccgcaatttgcttttcatctagctcagttcccttcatcaaacgaaactgaatcaaaacactttctgcaaccggaaaagcatacttaccatcaaggtatatattatatcgacccttccgtttttgcgtctcaattttcgaaatttttgccatttttaaatttctccttaacattctcaatttttaatcgtttataaaggtgtaagcagtggccgctacttaacaaatcaaattaaacaaaggaagtttttatcatgcaaatggttcgtaatttcaaatccgctaaaattcagcttaccctcaccaacagtgaacatcccaagggcgttaaacatccctttaacaacattattgaggatgtcactaatgagcaggtagcacaatttagtgcggcaattgaaatacttactgctgaaagatgccttgatacagacattatcgttactagtcaagttgcaatgaacaactaatttcaaggaggaaattaatttatgcgtacattaagcttaactttcaagggtagtcttggtaaaaaacattcattaaagttgaactatgccagtggtgatctcgatgccgaaaccgttcggaaggcaatgcaagaaattgcgcaaacccacctctttactaaggaaggcgaagatatttatcagcaacctctttctgcaaaatacattgatactgtttctaccgttatctttaacgacgagcaaaagtaattaaatatcgagttctaaagatcttcaacatttggaggctaggaaaaattcctagcctccatttttgtttgtactctttctttctaccagttgccaaaagtgtttcttggcatgcaactcaccttcatgacattcttgtagagcagcatttagcgccgcccccagcatgatgatatagccagaaaagtcaagccataccatcatggcaataaaagctccaattgtcttgtaggaaattaccccgtgactaaataataaggtatagaacgagaataaacgtgataatcccatccataacaaagacgccaagaatgacccagcaagtgcatagcgcaaccgaaccttcgcattaggaacaaagtaatacaaaagagcaagagcaataaacaagacgccaaatgttactggccaccttaatgagctaaacaataaaatgtagtcacgccgaaaattaaaaatcggctgaatactctttaggacttgttcaccaaaaccgtacaaaataataataataaaaataattaccaataatacaatcatccaaataaacgagacgattcggttcatcaccggattctgattttccgcaatcccatacgcatgattaacgctgcgttgaaaagcggcaatcccctgactggtcgaccaaagagcaatcaaggccccagttgtcagaacaccaccactcccccgtcgtaagaaatcataaatcaacggctggataaaatcatagaccgattcaggaattgcagttgagaggtaggctaaaatcgtcttagcgtcaattccaatcatcggtaataaatttcctactaccatcacggcgggaaaaatagataataaggtatagtaagctaagacagcagcagaacttgaaatctgggccattgtaatatgttggattaataacgcaataaaagtcttccctttgcccggttccttgtccataataacctccgaaaacattttataggtttaattataacaaactgaacacccgacaaatattacagaatagataaaaaagcggctgggagaaaacttttgttttctctcagcctcaattacttattatgaataatagtaagataacgtggaactagcttcgcgtcgccacaaggctcgagtctaagtacgaacgataatcagcccgtgccgtgctaatcatcgttccagcttagcccaccgccttgtcgagaaggttatttcccacttccttttttatcaattacccttcaacatggtgacgctttgcggaaatttgatagaagaccaacgcaacgattgcaaagaagattggtccagcaagtgtccagaaagctgtttgataatctttttgtaatagtggttgaacaaacgtaaagacgattccgacaattaaaatcaattcaacgaaacatactaatacatctgtccagaaacggttcttaaagacaacgaatggccggtcaaggtccttctttgccttaaagaatgggaaagccccgatcaagaaaacatatgggaaacaagttgaaacgttcgccatatcagtcaaaatcaagtagaactgttgagcagcatttccaccaaaggcaaccaagaaaacaataattgaaacaataattgcttgaagccacattacatttgcaggcatccccgccttgttaagtttcgtaagtttctttggccataattctggattagaaccaagaatgaaggccttgattggggagtaaagcagaataaacaacgcgcccaaaaagccaagggtctgtgcaaaggcaacgatccgcgtcatgataagtccaaaagtaagggcagcaccgtgcgaccatccaagcgtatcccccatggtaacccctaattgattaaagacaacataggtaacattaccaaggttaacgctgctcttagtcaaagtttgttgataatttactgaccaaccgagcatgaaaatcattaagacataagtaccaattgtaaagatacttgcgatgatcaatccacgagggaatgtcttttccggatttttcatactatcagtaacagaccctaatgattccattccaccgtaagcaaaaatagcataaacaacaaacgaaataatggcaattggtgtctggaattgtggattaggtgatgtaatgaaagttgaagcaccatgaattggttgctttaagattcccttatcggcaactaaaacaataacactgacaataacaaagataatgttaacaacaattgtaaaaataccaccaagtgaaccaactttagcaatggcggtcattccccgtgaactgcaccaagttgttccaagaatcaacagaatcccaaggaccccaatcaattgagtcgaagtcagaccaaatgcatgccattgttgggtagtatccttaccaaaaagcaacgcagaaaaagtaatccaaatccgtgatgctgttgataccatccatacaatccaagatgctagccatacgaaagtaccgacaaaggcgattcgttcaccaactgaaccggcaagccaggaataaatgccccctttagcatccttaaatgtggaaccgtactctgccatcatcaagccacagggaaagaagaaacaaatccctgctaatgcgtaccaaataatactaccgtaacccatttgtaagtaggcgtttgaaacattcccaaaaccaaaaatggcggtaatgatcatcgtcactagtccaaaggtagtaatcatctttttattactactctgttcgtccaaaataatgcctccaaagctttaaaattcttaaataaaaataagaaattatttaataattattagtatagtcgtcttttaaaaaataaaagtcttttaaataatttcacattacttttatactaccttttgtatttttacgccaacttagcaatctttattcgtttatttgtatattttgttataagcgatgtatactattttcattacttaataatcgctttcacatttaatcttaatgctatggatagcgttttccgacgctgctataattgagttaagaaaatttatgtgattttcactctaatatataagatcgtgaggtggagtaaatgagtgagaaaaaaggtattaatacgacggaactaacccttttaatcgtgggatcaacaattggttcgggagtatttggaattaccagtgatttagctaccgcggcggctcccggaccagcaatcattgcctggataatagtagggattggcgtcttgactttagttctctccctaactaatctttcgcaaaagcggccaggccttgattcagggattttcagctatgcggcagctgcttttggtccgctgggcgaatttatttctggttgggcatactggctttcagcgtggctcggcaatattgcttttgcgacgattatgatgagcgcccttggaacgtttttccccagcctatttgccaatggtcaaaacttattctcaattattgttgcaattattttaacctgggttttgacattcttggtaaatcgagggatcgaatcagcggctttcatcaattcaattgggacaatctgcaagattattccattagtcgtctttgttatctgtgtgattcttggttttaaagctaagatttttactgctgatttctggggcaatgtaacacagaatctcagttcaaaaatcgaaactggttcaatctatgaccaagtaaaggcctcaattatggtaatgatgtggctatttgtcggcgttgaaggtgcctcggttctttctagtcgtgccaaaacacggactgatgctgaacgggcttccatcttcggtcttgtaagcctactcgttatctacattgtggtttctattctgccatacggggtaatgacccgcgcccagttagcagctggtggtcaaccggcgcttggggcgatcatgcaacatctggttggaacgtggggtgccgcccttatcagcattggattgatcatctcagttttagtttcatggctctcgtggacaatgctaccagctgaatcattaatgctaatggctgatgatgaaacccttccaacatcatggggtaagctaaatgacaaaaaagcgccaacacaggcattaataatcaccggggttcttcaatcaatcttcctcttctctttacttttcactacctatgcttacaactttgcatatacgctttgtacggctgcgattttgatctgttacctccttgttggcatttaccagatgatgtacagttggcaacaccaagaatggggacaatttgttattggactaatcaccactctctttgaactgatggcaatggttctctctggctggaaagaaataatggtcgtttcagtcggttttattcctggattcttcttttacgtccaagcatgcaaggaattccatcactcaatcacagtaaaggaaaaatgggcaatggggattatcgctgtctttgcggttatttctttagtattagtaatcaacggaacaatttcaattaattaaaggaggaaaagatcatggtagaaatagcacattttggtgtcgaagcatggctaaataagtgggaaaagagcgcgacttatgatatttcacaaagtacaatcgcctctttgagtatgcacgatctcttaaatttagatggtaacaatggtgaagagttttatgagatgcttgataagcagcaaatgaactacgggtggattgaaggatcacccgagttcaaagaagaagttgctaaactatatcatcatgttgatccggaaaatatcttgcaaacaaacggtgccacaggagcaaatattttagctctctatgccttgatcaatcccggtgatcatgtaattgccgaatacccttcttaccaacaactctacgacattcctaaatcattaggtgcagatgttgattactggcatattcatgaagaagataactggtacccacgaatcgatgacctaaaagcgatggtcaaacctaatactaaaatgatttgtctaaacaacgcaaataatccaacgggaacggttcttgataaagagtttctcgaacaagttgttgaaattgctaagtcagtcgatgcttatgttcttgttgatgaagtctacttgcccctcgatcaccccgaaaaatttgcgcagattattgatctttacgataaaggaatctctactaattctctttcgaagacttattcagttccaggagttcgaatcggttggaccgcgactaacgctgaagttgccgatatcttccgtaagttccgtgactacaccatgatctgtggaggagtctttaacgaccagctcgccacctatgttttacgtcatcgtgatcaagttctcgcccggaaccggaaattagttcttggcaacctcgccatttataaggattggattgatcatgaagaccgagcaagtgtcatcatgccacaagcagtctctacttcctttccaaagcttgacgtgccggttgatattcataccttctgtgaaaacttacttcatgacgaaggggttctcctcgtgcccggcgatgcttttgatactccaggtcacgttcgcctcggctactgcgcaccagaggcaactttaaaagaaggcttaaagcggctttcaaagtatatgcatcaatatgattagcgttacaaaaaaggatgttagaaacatgcaaaagttttctaacatcctttttactgctagcgattaattttcaaactgcttagcaaccttttctgcgatctcacggtaatggtctaagtacttagcataattatcatcgtacatgtaatcagcatctgcttctggatcttgagacgtcaaaatcttcggaccatcattcgtaataactaaggtatgttcgtattggcaactccaaccaccatcagcagtcttggcaagccaaccacttggatcactggtatcagcttcccaagtaccagtgttaatcattggttcaacagtaatggtcatcccgttacgaagacggattccttgaccgtgttcgccgtaatgaggcaccattggatcttcatgcatcgttggttgaataccgtgaccaacaaattcacggacatccccatagccattctcatcttctgtgtagtgttgaatcaccgcaccaatatcaccaatccggttaccaggaacacattggtcaattcccataaacagtgacttcttagtaacgtccattaacttttggatttcaggggaaacttctcctaccgcatagctccagcaagaatcactgaaagcaccgtcgacactgacaaccgtatcaacctttactaagtcgcccttctttaagattaacttcttacgagggaacccgtgacaaatttcatcattaacactaacacaggtagcgtacttgtatccttcaaagccaatttgttcagcttttgctccagcagccttgaagtacttccgagcgaattcttcgatcttccaacttgagatgcctggcttaataattttacgaaggccaaggtgcattgctgctaaggctgccccggccttttccattgcatcgatttctcgaggtgattttaaactaatcattttcgcgatctccttatttacaatctaacataaatagtataccacttgtctgccctgatatcgcaaaccgtgctatactatatgaacgttatagatttaatggaggttataaaatggcaaaagcacttgtagtatacgcaaccattaccggtaataatgaagacgttgcggacattattactgacgctcttgaaaatttaggagtagaagtcgatgaagttgaaatgacaatggctgatccagctgactttgaagaagctgatatttgtgtgatctgtccttacacttacgatgagggagctcttccagaagaaggaattgacttttatgaagacttgcaagaagaacaactagcaggcaaagtttacggagttgccggctctggtgatactttctatggggatgacttctgtgtcgccgtcgataaatttggggatgcccttgccaagacaggggcaactaagggcgctgaaaatgttaaaatcaacctcgcaccagatgaagaagacattcaaaagctcgatgccttcgctaagcaattagtagaaaaggcggctaaactgaatgattaaggatctgtgggtaaaatataagtcaatcattgcctaccttttctggggcgttgtcacaacggtggttaacttagcagtattccagattttgagtccgggacttcactggaatgttgcccttgcaactgtaattgcgtggtttgcatccgtattagttgcttattttaccaataaagtctgggtatttggttcccattacactaccgttagtgactttattgttgaaattttccgatttttcttttatcgtggattgactttatttatcgatttaataattacgtatgtaggtatcaaagttttgaaattcgatacacctctccaacaatttatcgttaaatttattgataatgtcattgtggtaattgctaattatattttctcaaagtggttaatcttcaaagataaccgtgatattgcagataaataaatgataggattcggactgtaaacttacagtgcgaattttttatttatcttaaaaattccaactataataaatacgaagaaggtattgacctaaaatgatgaaaaaattcctaccaattgaaaaaatattagaagcttatacagcaattgctgacggtcacgttaaacttgaaaacgatcaagcactcgtaacctcttctaatgaagcgaaaacttataccgtcaccctttcacgacaatacctatacttcaaatgacaatgcctcatactggcaaggctatcttggctatcccggaattgctgtcctgatgcttcaaggaaagttaccttatgataaggaattagctcaacaatttgctggagttgattggaataaaatcaatcaagaatataagcgtaattatgcgcaagctgctgatgctgttatgactgttaaaggaattgataagaagaaagcagagacggaacttcatcatgtttacaatgtcctaaagcaattaccaattatcgttaaacgtggatcattacgatcacctaaagcaaactaaaggtgaataagagactactcttttacataaaaagctctcttattcaccttttttattgttgtgataagtatttttcaacaattttaagaatcttttcgcttgcgtgcccatctccaaatggtacttccgctagttccatttgccgatacttcttctcatcatttaacaattcaaaaaccgcttgttgaatcgttgtcggatcagtaccaacaatttttacgccccctaggctgaccgcttcttgacgttctgtttcatcacgtaaaagcaaaagagggcgatgcaatgctggagcttcttcctgcaaaccgcctgaatcagttaacagaatcgaactccgggcagcaatatttaagaaatcatgatgatttaatggtgtaataagatgaatccggtcatgatctcctaaaatatcattagccagtaattcttcttctggatgaggatagacaggaaatatcaggtcaagattgttgttagtttccacaatatcacgcattgtatggaaaacacgcttcatgggggcgccgaggttatctttgcgccgcattgtcattaataaaatccgattatctgctgggatggactgcagtaaaggatgcgtaaaatcttcttgtaaattatgcttcacgctatcaattgaagtatttccagtaacatagattcgttttgctggatggtgctcttgcaataaattatcgcgggcacttgtcgttggcgcaaaataaaggtctgctagattatctgtaaggcgccgatgcatttcatcagggaatggcgaataccgttcataagtacgcaaaccagcttcaacatggccaagtgaaatatgatgataaaaactaatcaaactggcagccaaacttgtagtagcatcaccagccacaaggatcatatctggttgtccagcattaatcacattatttaagttatgcaacagttggctcaatagttcaacttcatttgtacttgttacgttcgatgaatcaacactgaaatcaatttggaaattcaaatatgccaacgtgtcgtttaataattgtgaatttcccgttgcaacaagaactggttgccaggtcgcaggattttgatgcatcaatctaatgatcggcgccaacttcaaaacctcagcccgcgtaccaaacaaaaacataatcttatatggtggctgcattaatgactctcccttcagcttttaataaaaaagacgtaatcactaaacaaagcaatcacgtcgacagtgcattatcaaatggtcccatccggatttgaaccggaatcgaccgcttaggaggcggatgtactatccaattatactataggaccaaactaaagaatattatcgcatttacgaaggatttcgtaaagacggtaattattcttttttagttttcgttatttttacgacgatgcttcaaacgaattcctttatttttgcgattctttttctttcgccgtttctttggcttagagaatccactgagagtttgattcatctttttatgggtttccccacttaattgttctttttgcaagtgacgactagcctgctgtttgattgaaaccacccgttgaccctcttctggtttctggttggttaatttattatcaccaatgtagagcttagttagttcatagtcactatcagcaagcaacttcttaaggtcacgaatatcatgatcatcacctaaactaagtgctaatcctggttctccttgtcgcccagtacggccaacccgatgaatataggtattgagcgatgtcggcaagtcaaagttaataacggcaggcaatttaggaatatcaatgccccgggctgccaaatccgtcgtcaacaacaacttgatttgccgcttccgaaacatccgcatcgctttttcccgttgtacttgtttttgtctaccgcccaaggtatctaccggaacatgttcgtgtcgcaaccgacttgcagcatagttaagggtgcgggtactgttgaagaagataagcgcccgaaaatctttaatacttgtcagccgacgtaaagttgctgttttttgcgcattggttcgtgcacttaagtaaccatgttctaccggtccctgagaagtatcctcatcacgaacatcaatagtttcaatatcgcgaccaaacatcacattcaattcatccagaacaggagattttgtagcagaaaagaatgctagttgagtagataacggggtcgcacgctcaatatcttctacgacagctaaagtatcgtcttgaagcatgtcatcagcttcatcaataaccattgtcattaaatggccgagttttaagtgatggttatcaagcatatggagtacccgtccaggtgtccctactacgacatcagggtgttggtgtaaattcataacttgtcgccgtaaatttgcccccctgtcagggattgaacgctaacgccaattaaagttgcccattcacggattaccttggttgtttgaattgccaattcttgtgaaggtgcgagaaccaataattgagttccctcgcctggcataatcttaggcaagagtggcaacgtaaaggctagggtcttaccagagccagtcggtgctattccaaggacagattggtcagtttttaatgccggcgcaactgctttttggattgcagttggttgcttgtatttttcatcaaagtgtttttgaaattgttcgatcaaattaaatcatcctattcttgatcgttatcagatgggaaaactagttgagcagattgacgaagggagtacataactgagttgaccgtcttagataattctaaccaatgcttgtacttcttcatttcttcttcatcatcaggattgttaaagaggtctgcgaaatcattcatttcatcagtcattgagttttcttcaacgggcgcttcgattgggtgcgcattttggtcagcatcataataagtaacctttcgcgtatcaaaaatactatcaaagactaaagtatctttcaagccgtaaacttcagaataaaggtgggagttagctgtcttaccaaagttgagagtgacagtaaatttgtcatagttaagaattgcaacccctttaccatcaaccccagttttagtcagagttgggaaataaactacagattctggttcaccgtaaatagtaacggccccatatacagcatatacaccgaggtccattaaagctcccccagcatacttaagggtaaaaatatttggatatggttcactgccattaagaactttatcaaaacgtgatgagtatttcattacagtgatggttgctccttgaatataatgttccttcatctcatcaactttcttcaaggcagcttgataaatcttggtatggatatgacgagctgcttcaaccaaacgtgccttaggatgggctgccaataatgattcaatcgcactgtattcacttggatttacgaaagctggcttttcaacaataataaatttatcgttttcaattgctttccgtgcttgttggtagtgcaaactatttggtgaagcaatataaacgacatcaaaatcgccctcttcaaagaacttatcaatgttatcgtaaaattcagttgccccatatggcttgccaaacttctcagcatgttctaatgtccgagaatagacagctgtcaattcatattttcctgttttcttggctgcatctaacatctgatcagtaataatatttgttccaataacaccaagttttaacataaaatcaactcttccttttcaaatatttctttgcttacatctaattttaacaattattgcgcgtttttaacagaaatgaaatcttctgataatagaaatgtgtgtataattagttatgttatagaatgacttatcacttaattgaggagactgataaaatatgagaaaaaaaggaatgttacttttcggcgcgggactaatggctggactcaccagtactttagggttcagtcgtgcgaagaaaagcaataatacgatctcgttacctatcttttatgcgggcacatggcaatattatgataaagaacgagatcgctctcataaaataaccatctctcctgaattaaagctcggtatcgataaccagatcattccggcaacggttcaacaaatcaaacctgataagttagttttccttgatcgatttggttatcacattactattcgggcaaatgaacaacggccagtttcattaaccgatgaagctgatgaccaagtttatactattcaaccattaaaataatgttggcgctgtaagacagcgttttttatttttaaattatttttgagcgtactgacgatgtgccggtgctttataattttgcataaatgccaaaatctggtcaaactggtcactaaaacagatactatttagataaggatcttctacaaagcccgccttattcatttgcttaaataggtcgtttaacgaatcataaaagccattaaagttgtaaaaagcaactggcttatgattatccccaactgttgtccatgaggcggcttcggtaatttcctctagtgtcccaaagccgccgggaaaagctaataacccatccgcaagatccatcatcgtttgcttgcgaatatccatattagggacaattcttacatcttttaattcgttataaatggctccacgttcagctagctcagtagttattaccccgtgaacaacgccgccattttttaagactgtccgagcaagggttcccatcaagccaaacgcaccggcaccataaactaattcaatatcgtgttggaccagccattcaccaaatcgttgtgcttcatgattaaatgccggattatttccatcacgcgcaccacaataaactgcaattcgtttaatcatacaactactcccctttaatattttttagagaatctaattgatgcttaattgttgctgccgcactcttaatctcttcttcttccaatgggtaaagttttaagagaagaaggttgccaattccttgccgaccaattaacgctggaaaactaatgtaagtggaatactgcggctgataaattgcaaccggcaacgctaattgttcatccgcaaaaattgccgtaataattcggagagtccaagcagtaacagcactaacattgtaccctaatccatcgagagtgtaccaattactaaggttcgccttaattttaagctgactttgatctaagtgatgaccattgattgccgcagttaagggttgtccattcacacgaacagttgaccaagcaaatacctgatgaccatcgtgttgaccatagacaaaaccagttacattggcagcggcgacctttgcggcttctgcaattgcccgataaaggcgcgccgtttcaacaaccgtgccaatcccaattacttgcttttgcggcaagccaactttttgctggagaacagcagtaattgcctcattaggattagtaaggttgattaagatcccactaaaatcactcttaaaaatcttattaccaacttgtaaggcctgctgatagctggtctcaagctcagccattggttgttgcttcatcaaagcactctttccaaaggcggtaataaggatatccgcatcggctaaggcagcgtaatcttgaataattatttttgtgtgggtcgccaagaccgtttgggaatcatttaaatcagtctgaattgcaatagctagttgatctttttcatcaatcaaaactaattcatcaactcttccgttcattactaattggttggctagcatttcacccacatgaccgaggccaataattccaatctttctcatttttagcgcttctttctatttcccgggaaataacgaaagtgaaaacaaggttattaccctactttaaaaagatagagactaggaaataatctcctcagtctcttttttacttttcctgaaaatcctgaacttctggaaaatcactaagaattacatcacgggcaccctttgagaaatcaaaagttgcttgagcattatagctttcttgatgatctcctacatataatactacttgcgttggttgcaagtctatttggacacctaactcaatggcagctttaaccaattgttgaacatcatctgagtaaacatcgctgattgcttgcaatggatgttggaaattaatatttttcgtgtaacgatcattggcaatttttaacccaaatgataataaatcaccattttcaagttgatctgctaactgaccgctaagagttagcgaaggatcatccactcgtcgttgtacaaacttcaaagcaagctggtattctcgcggagcattaaactcaacaataaagttttgcaactctgcgattaactgcattgcttcttcatgcatccacggtaattgttcctttggcttttgtaaggccactccattattccgcttttttgcttccgctaatcgttcctccaagttatcaggtaatggtgaaagaatactatttaaaagcattaattcaaggaagttaatcgtatcgtcactaattcctgttcgcgacaacgggtcaaggtcaaaattacgaaattcaagataatcaattcccttatgtaaggccccatcaatatcatgcatatcatggttatgccgccgtaaccgtaccgggccaaagaattccttcatactatagtaagtgccattgtccatgaagtgctttagttctgcaaaatactggtcgtatgaagtataggtaacttgctcattggtaaagttatcatccccataatcactacaacgcaaactccgaactggcagctccaaatcctctggaatactatgtggcatatcttcagaaaccggacttgctccatataagtacgtaaataaccattgataaaggtagaacttttgcgctaatttaaagtaaagatgattttgaaaatcaatacggtttggataccggtccgcataaaagcggtgataaatctcgttgattaattcaccatccaaactaaaattaacatggacatcccctaaaatttcttgaacaataccatatttcttccctagataatcatgagtctcttggtcccatttcttagtaaatgcagtttgtaaatattcaaggtcatgctgataagtcggtcctggcgccatacttaacggccataatcgttcatcactccgtaaatgtgagataacaatctgctctaacatttttagttgccggactgcatttttagctccaacaactggacccgtttcaaagtccatcatgtcatccgtatagcctgagttcaaataaatattatattgccgtgaacgcagattttcaggatatggataacgacttgcccgcccattggtcaaaattcggtgcttctttgcctctaaaccaaactgtgaagaaaaaagtttggcatttaatgacggttcttttaaagctgctttaagttgatcataatcggttcccatccaagaatccctccaatcaatcattttaattttattcaagttcaaccataacacgtttggaacataatagacaataacaacttaattatttcactggataatcacttcaaaatagattaacgctttctgtccttaattataccaatctccgccaccaaggaacataaaagtgctgaaatgctttattcttagcaaagaaatgattaattccgctatttttacactgatgttcttttaatgaattgacataatcagcataaacttctattcgctgcgaatctggaacgccccgccatgcgataacatcctgcatattttttactaagtcagcataattaccgccatcatcataatcaataggtgcctgccaatattttttagcaacccttcgaagctgactatcggtcggttgagtaatatcaagacgttgatgagtgtgacgatatttaccagttacataatactccccatagggaattccatagttaaaagattctgtatcagcgatttgccgtaattgattggtcgaataatgcgtggggtctgaatcaactcttccttggttatcaaagcgataaatattccattgactaacaaactttcctgtttcgatatcaacaataaattcaatcattcgggctggattagcataccgacgatacgaattacgaactaattgaaccttcatattagaggggtaagcaaatttatgatgataacgattatggtaattagcaccagttttaaagtctaatttaaagtgattatcgtgggcataggaaagcaatcgttgaaaatctgtcgcttctggtgaaagagagggacgctgatattggcgaataaaagtgatgttttgccgatcaagataactgcgaaataaatgaattttgcgtcctaacaaatctgcttttagccctttcttccctgaataagccgtcacaactagatcacgaaaataaggatagaaaaaactggtaggggctaactgaggtgaaaattgatatacagttggtgaaaattgaagaaatccatagttatcaatataagcttgtaaatggtgattaataattaaatcaagctgttcatgagcgttaagaccgctttgtttcaaggttcttatataattaacggaaccaatttgatttgcttttatcatgttatttgtcataaatatcatttaacggttcatgaaccatcgtaatatgctcgcgctcggcctccataaaatggtcacccacagattcaaaaccatattttttgtaaaagtcctcaacataggcttgggcatgaatagttatcttaaagttggggaaattcactttgattccacttaataaatgttcaataatctttccacctaaaccaatcccgcgtgcttgtggagccacaactacgcgaccaaaagttacaacatcattctgaataaaataacgtgcataggcaactacttcaccattagtagttgcaaaaacatggtgcgcaagtgggtcactatcatccggatcaggataggaactctgttgttctccattaaaaacttgtgctcgtaacttaagaatggcaaaaagttcattaactgttagttcagtaaattgtttatcaaaccattgcataatttatccctcctataattttatatattatacaaaaactagtaagttagcataattttcccgcaaagcaattttattattaaatttatggaatataataaaggtaaggatttatttatgaagggagcgttcaataatggataatttttcacctaatcgtcgaaacgttgttgatattaccgacttaaataagtttttaacaaaaatgtatggtttaatgaccctggcagtattgctttctgccttaaccgcttggctcgtaatgactgttttcgctcagcaatttactgcttttatggtcaataaccgctggggaatgtggttaattatcctcttgccaattatcctaacgtttgggattaattttaatgctacttgtagtcctggtctttgtctgttcctattaattttaacagcgatagtctacggaattacctttgcttttatcgcaggcgcttatgctggtactgatattgcaacagccttcgtttcctcagcgggtgtattcttaacaatggcgattattggtactttttctcaccgtgattttacgcgacttggttcttatgccagtgcggccttaatcggcttgattatcgccatgctggttaacttttttgtgcaaagtccaataattaattatctgctttcaatcgttgcggtaatcatttttacggcattaacagcttgggatgcacaacgaatgaaaaatatctataccgagtgtaatggtcaagtatcatccaatgggctagctgtccttggtgcattacagctttaccttgattttattaatctctttattagtttcttagacatttttggatcaagtaatgaaagttgaactactcccacttagctaaacctacggtttaatgcttgaagtgggagattctggaaacatcgcatacttaccctaccgattctgaacgaaccttcaagcagaggttacgactattagccaaggctcgtcccgagcctaactttatctatcggatagctaatcctttttgcaagatgacttgtgcagcgttaatatcacgatctaaatgtttaccacagtttggacaatcccactcacgtaccgctaaccattccgatttattcaatcctaaccgatgattattcttcccacaattagcacaaatttggctagtatatgacggattgacctgaataagctttttaccgtaccagtaacacttatattgcaatatatctactaattttgaccagctagcgttagcgattgctctagctaaatggtgattcttcatcattcccttagtattaagtttttccaacacaatgatgtcgtactttttgaccaatttagtagtgaatttttgtagctgatccaaccgttggttggcaatcttttgccgatacttcgccaccataatacgagctttctgataattcgtaaaatcgtctaattgccgtggaactaacactttattatgatgatcccaggcgatttcctgctgggcctttaagaaccgacgactacgcaatttctcccaacgatacaactttttacggtatttgtcttcaaaatgattgatcggttccttgcatccatctgaaagattaagtaatgacttaagtcctaaatcgccaccaatatatttacttgttttaggaagagtttggttttcgctttccactaaaacagtaatgtaatattgaccagcaacgttcagacgaacagtgacattcttaattttacccattggcaatcgaccagctctaaaatagacgataccgagttttggtaactttatatgatggcaatctaaaactttaatattgccattaacgtactttgaattgtagctctgagaatattttctggatttaaatcgagggaacttattttgacctttaaaaaagcgttgaaaagcatcagctaaattgcgattagcactttgcaaagcagttgattctgcttgtttcaaccaaggatactcaaccttaagttgtttcaacagattattcatcccaaaggcattcacaaatttagcttccggattattcttgcgccgttcaatttgcatattaagcatttgattccatacaaaacgaacacaaccgaaggtttgccagagctgatttcgttgtgctgaatttggatagatgcgcattttaacagcttttagaaccattattttctcccttgactttcaatatatcgttttacaacttctaaaagcgctccaccagtgctaattaagcaatatctttgtgtccaaaaggctgattcccaaagatattgcttgatttctggaaattgttttttgaccattctggagctagacgatttgtaatcatttaaaaatttagccatttccgtatgaggcgttgctctaaacaaaacatgtacgtggtcctgatcatgattccattcttgcaaattaatgccgtatgcttgtctcacaactacaaaacgatgtttaagatattcagatatttcatcgttaattacttttcgacgatacttaaccaccattaccaaatggtaattaggtaagtatactgaatgctgatttctatctaattctattgttatcaccacattttatagatatatactaaatatatcatagaacaaaagaaaaagcactaacgtgctttaagagagcgattcatcccctacttatagaagtgggggtattctcgcaaatttatggataaaatcaatagacaaaaaagtattaagagagtcattaagcatccctcctaatataaatataagatagattttaataactctccactattacacttttaatcgtctaaagtaattattttttcaaagcgaaacatttcattattagtatcatcctgagtttcatagttaagatctagatggctttggttataaaattctacagcagcaaagccacaacgattgatataaaaatgaatatttcgtttatcaaaatacggggtacatgtctcccaaagaactgtttgtggatatttctgctctaatgcagtccaaattttataaccaattcctttattttggtgtgcagtatcaacgtataaaaagtctaaatgattgtgatgtgtttgatcatcgatttgtacaattgcgccacccacaatctcatgatctacaaccgccttaaatccatgggcattatcacaagtaagagatacataaatatcttcagtcggtaatacatcttctaaggagctatcctgtacttgagctgcttgattaaacgaatctttcattgcaggaacaaaaattggtaaatctttttcattaagtggcataagcttaaaatccatcgttttacctcctaaaatacataaaactaaacaactaataatttaaggaattttaccatttgctgcaaatttttgaccacttattacatatacaatataagcggtgacaaatataatatacttagattagaaaggaagtgggaattatgaaagtaaactgtcatatcgaccctaatattgaagaggaacacctcgatttatttgtccgtgaaatgaatccccaaattaataacctcttaaaaggttttacaagtaccgaaccagtattatggtgttatgacgccgatcaaattatccccattaaattctcggatatctttgaactaactgtcgctaagactggtactaaaatttcaacaaaagatcatacctacttttatcgtgaacggttatcccacttcaaaagcaatcttccgaatgattttattgaagcatctgtcagcactatttttaattatcattaccttgatcaccttgagttattagataatggtttgatagatgcaattttaacaaatggtagccatattcagatttcgcgacgaaaaatcaaaaatttgaaagcgaggttaggactatgaaaaaatatgtcaaatatacgattggtttctcaggaattggtgttctaattggcttagcaatctctttagttttcaactatcttaacggcagtaccacttactacccatcatcccctaattttgttaaccaattcgctcatcccttaacggcgtaactgtttctgttattttatggatgctaattggctgtgtttttgggtttggcagtttaatttttgaatttaaaaattggtcactgctaaagaaaacgatcattaatttttgtgcttactatgctggctttgcgccattagcaatcctatgcggttggttcccattgacttggattaattttgccattttcacgcttatctttattgtaatttatgtcataatttggcttcttaattggtactcaataaaaaaagagattcgctcaattaatcagcaaatcaaaaagtagttttccctcacatttgattgtaataagcctggactaattcaacaaagttattaatattataagttgttccaaataacttacgagccgatgtcgaccaataagaaattgggtcttcatgatcagttccaccaagataacttgaaatcattgcatgggtccaaacagtgccaccaccatctttggttcctttcgtcacgggcaaattattctgttttaagatataggctgtatagtaagcagcattgccaagctggtttgcaaaagaagctgcggtatattcatgaggcatttcaaactggacaaaatatggattagcatatggccctgctccttctgccatatattttgtatccgcaatattaataatttgttgattatcaataaatgtatgaacaaacactctagttgaactataattttgcttcatgtaagatacttcactactaatcgttgaattttcattcccagtatcatgaattacgaccccacgaggatttccagatgaagtactatacccgcgttgttcaaatatacttgaaatttgtttagtaattttagcgtgtggaagaccagattgagtaaggtaactattgatttcgttattcattttcaactcaatatcggtggcccgaacaaaataattttttccattatagttaatccgtgcgtaagtatcatcgttatcattagaagtcagatagtagcgattgaccttaactaaggcttgatcaggcaggttggcgcgttgaattgctgaaagtgaattatatactcttgcgccactgcttaacgtagccatttcactaacagcatatgaattactaacctcccgcgtatgatgagaataaaaccaactcccaccgattattgccgcgacgattataataagtgatagatatattaaattttgttttttctttctctttgccatactagttattgtaacgaataaatttgaattttgtaggaaaaaactaattatttataagtaaagttaaaaatcccttgccttcataaatactgaaagcaagggatcatttttatttactaattattaatcagcctcacagcaaacatgatatttacgtgattaacacctatgcaagtggtattgttaaataaaaatatttatgatattatacacttacaaaaaataagtatgaggaaggagcaactaattatgaatgtcgaattaggaatctcaacatttggtgaaacgaccccactcgaaaaaactggtaaggccattagccatgatgaacggattagaaatcttattgaagaagtagaattagccgaccaagtaggaatcgatgcatatgctatcggtgagcaccaccgcaaagactttgcagtttcggcacctgaaatcattatagcgatggcggccgcaaaaacaaaacaaattcatctttcaagcgccactactaatttaccaacgattgatccaattcgggtttttgagcaatatgccacaattgatgcaatggctcctggaagaattgaaattatggctggtcgcggatcatttactgaagcttttgacttatttggttacgatcttgataattatgatgaactatttaaagaaaaattggatatgctagttgaaattaaccggaacgaaattcttgattggccaaaaggaaagttcacgccaaaagttgaccacattggaatctatcctcggccaaagaagcccttgaaaatatcactagctactggcggcaatcctaactcgaccattagagcggccgaaatgggactaccaatcgtttatgcaattattggtggtcagatggatgcctttaagccattagtacagctctatcgtgttgtggctgaaaaaacaggtcacaaattaagtgaaatgccagtttcggctcactcgtggggatggctaagcgatgataaggaaaaggcaatcaaagaatatttctatccaactaaattacttgttgatacaattagtaaagagcggccacaatggactggcatgacatatgaacaataccttgaaagtattggcgaaaacggtgttatttttgttgggaatgccgatacggttgctgacaagattattaaaatgatggaagtgcttggcttgaagcgtttctacctccacttgccaattgcctcaatgccccataaagatgtattaaaagcaattgaaatttatgggaaagaggttgtaccaaaagttaaaaaatattttaaggataaaagtaaattgaatgacttttcaattaaatggaaagaataaaaagatagacgccgatgagaaaagatttttctcacctgcgtctttttattattagggcttaatattctcagttgaaagtctgtgccgttcaaatggaactagggatatgttgaaggaatatttcccaggaaataatcatttaacggcatctttaattggaagataattaggattaagattattctcttcagaccgatcaacaaattttgcttcagtgattccatattcatctgcttaaatttcaatctttcctaaaggcgacgagtaattaaaccttgcaatcattatgccgtttctatttagtcaaaatgcaaaatttcatttacaggacgacgctctgaatggtagctattaattgtcgtatcagccgaataaccaagcgagataccaacaataaaccgttcatcctctggcacatctaaagtttggtgaagaatcgctgggaaacgaacgctgttataggttggaatcgttcccaagccataagcagttgcagctaacataatattttcagcaaataagcccgcatcaaaaatcgaccaatctggtgaagctttaggaatagtaatataaagaattacaggcgaatcatataaagtattacaggcgaatcatataaagtattactagcatttgtcatcttttcatgagcttcatcaaaattagcaaaatgatgaacaattccatgccgccattgcttcatattatcttgggtttgcggtgcccaatcttcacggctcatcactgacaaatctgaatccccttggttacctgcaatatcttgatcacgataagcattcttaatttcttgtaatgtatcgcccatcgcacaatatacttgccaaggttgagagtttacccatgatggagcacgttgagctaattcaacaattttagtaatcattttcttttcaacgggtttgtccgtaaattgacgaattgaatggcgttgattaattgcatcttgtaattccattagatgactcctcctaaatcacatactcttactaaagtttagcatatttaggtttactttaataagatcttgtattggtcactttattttttcgccgcactgcttctctaatcttgggatagcgaaccattaagcaagcaccataagtaaaactagttgcgacatttaacacccagatgaaccaggcgttgtgactacggaaaaatgcgattgtggataagtctttaagaacctcttcaaacagttcatgtgatatttccgtagcattaatatgggccccataaaacacttcaacactgatgccaattgcaaatgaaacaagccagcccacaagatacggccaattccttttaatcttcagaatcggtcgttgatgggaatctagtttattagtgtctttaatctgcgttttacttgtctgtagaaagccaatcgtagctcctaagattagaagaataattgtaagtccagctgccgttaaagatcttacgttttctaagctcaagaccatcataattgcagaatacactgggataattattagctcaaatcgtgttaccttttcatattcaaatgttcctttaatgaatttatagattaatagaattacaaatatagtcattgataataccctaacttttaagtttgtatttgtattgtactatatgactaagatagtgaaacggccaatttcaggaataataatctgagatagctaatgttagcaccaacatgtcccgtaacaatagaccattttcgtgaataggttgtccgtaatttttaacaaaaaagttccttttaatctcagtaacgcgaaaacctattttctggtaaaggtataactgcttaaagctcgtactcccagtgccaatttgcaattgttgataatgatgtacctttgcaaagtgaacggcatcctgcaatagcctggttgctattccgtgattttcaagccgtggatcaacagcaatattctttatttctaatttatccgatgtaagttcttgcaaaaccattacagcaatgggatgaccatctttagactgtgcaaaaagtatccctgattgcagataattttgaactaatttcttacttggatcagcactgagaagcaaatcccaatgttcaggagttactgtcgttactaattctatccttgtatcgttattagtcatttgacaatccctcatccatactattgatagttagaaactgctgatgaagctgttttgaaaatttcattactcaaactcctttttctattaagactgtttgcacacactttcttattaaggagactaattcccacttacattacttaaggcaacaatccagcaaccttatcgcctaacgttggataaatcgccattactttttggcgatactcatccccattaatcttcaaaccaataattggcaagaagttattaatatcatcagccgcataatcgccaatttcacttgcccctaccaattgctgatccttaaagactaaagtaagggtactgatgtgatcgttttggcctgcgtaaaggctaccatattttagcgcaactgtcttaacctgatattgtgagtcaccagtgacatcatctggattaacaccggcacgggcaacctctgggaatgtaaaggctgcttgaccaattgtcgggtaaacaatatcttgatccgttttacctattaaataatcaaaaagatattgaccctcaaattcagcgaccggtgttaatttaggttgtttccgattaataacatccccaattgcatacacaccgtcaaccgttgtcatcaagtgaccgtcgacattaataccatgacgatcatattcaatatcagtattttcaagcgctaatttttcgatatttggatgacgaccggttgcatcaagcacatagtcagcctgtacttcaccatgattagttgtaacgagcaagccgtctttcccttgagttactttttgcgtatcagtattaaagctaaattttattccccgttgcttcatcgcattaactagcgcttcatcttccgccttggtaaattcacgaaggacgcggtcagaatgaacaacgattgttacttcagcgccagcagctgctacaagggttgctaactctaagcccacaaagccagcaccgattatcgtaatccgttgtggaagttcttttaacgagaggaggtcataactggtatgaagatactctttacccgaaatattcagaatatttggtgtttgccccgtcgcaatgataatacgatcggcctggtattgatgaccgtttacactaatagtatggttatctacaaaacttgcgtagccgtcttcaatatcatgacttttcttaataatatcgcgagtttcgcctggccatggatcaaaccgcttaagcttagtctgcattaatgcttcccaatctaattttgctggttgactaatgcctcgaccaagaagttgctgagattggagaacagtccgggcagctccttctagaaaaatttttggttcgcacccatagttagggcaagttcccccatattcgaaaccctcaactaccaatactttacggtcggttttagccaaaagattagccattttataggctgctggccctgatccgatcagaatatcatcatactttttcatgttcatccctccagattcttacattattgagtcaagtgtaacttaagtaatgaaaagagtacaaacgttttgtttcgtcgtataaaaatattaatcaaaagtcaattaatacttatcctctttcattatgaaagcgaattcaactaatgatttaacagtattttgtctaacctattgtatgatccattcaagaatgatagattagcctttaattattaggaggtggtctacatgttacaagttaatacattatttatcatgatcgccagtattctcgtgttattaatgacaccaggactggcttttttctatggtggtctagtcaatcggcgccatgctaataacatgttgctaactgtttttatgatgtgtggcttagccgtgattctttggattacagtaggctactctctttcattttccggcaaccattggggaatagtcggaaatttaaataatacattaatgattcatgtgccaatcgatgctatcactaaaactggcattccaattggcgattatgcaatgttcatgatgatgtttgcaattattaccccggcaatcttttgtggatcggtcgtcggccacggacgctttaattttttaataatgtttaccatttgctggtctatctttgtttactacccccttgtgcatatggtttgggcaccatatggactattggcaagattaggggcagttgactttgctggtggattagttgttcatgtaaatgcggggataacggccttaatcctttcagcctgggttggtcgacggaaagatgttcattctcaacgcaataatttatcgtgggtattaattggaacagcccttttatggattggttggtacggctttaatgctggttcggccctcgccgttaatgatacggccgtacaagccatgttaacaacgaccatctcatgttcaagtgcaatggtaacatggatgttattggatcgttatcagtttaatcatgttaccctagctggtgtctgtaatggtgcaattaccggtttagtagcaatcactcctggagcaggctacgttacactaggtggttcaatgattattggaatagtcggtgcaatcgttagccaatactttattactaagatcaaaccacaactgccaattgatgatgttgttgatgcattcggttgccatggggttagtggtatctggggaagtattgcaactggtatttttgctagccatcagatcagtcatctagtacctaatgggcttttatttggtggtggtttgcaccttttgcttgttcaaatcttcgttaccttattgacaattatatttattggtgtgatggatattatcttaataaaactgctctcaattgttttaccggtttcgattgataatgaaaaactggcggcgattcaaagtaagtgaacttaaatttttactgcaaaattagattatttacgtatatattccttttagaagcaaaaatacataaggagtaaatttatgaataatctatcacgagaagaacaaattgccttaatctatgacaaatggcaaaagatgacaattactagtgatccaatgtttggactagtaatgcaaaataaagaaatttgtttagagttaattaatagagccctgccaaacattaaagcaaaacagattatccagttagacacccaaaaagatattaatattgttagtgcccatcgtgttcgctttgacgtttatgttcgtgatgataaaaataatatcattgtcattgagatgcaagttaataatcaaaataacataccagcacgcttacgttattaccaagaacaggttaatcatgagctattaagacctgaaaataattactcagtactcaataattaccctacttatattattatgttttgtaattttgattattttaagcagggatgggcactatatgaatttaatcttacttgtactagagaccataacttgaaatttggtgataatcggacagtcgttatcttcaatgctcttgctaaaaaatttgataaaaatgatgaaccgattaagaacttccttgctttaatgtgcaatcaaggcgacaataagaatagatttattgcacagattcaagacgaaattgataaagtcaaacaagatccagaaaggagaaatggctttatgaagtacgaattaaacttgatggacgctaaaatggaagcacgagaagaaggaatggcaaaagcaaaaagggaagatattaaaaagttaattgactctctttatgaacttaatattaaaccagagatcattaaacaaaaagttatggaaaaatataatttaactgatgatgaatatgataagtttctcggttaataaagggagcgagacagaagtcactcgtgacttcgtttttcgacgcgaagctagcctctgggagcccccgcaagcaacaataggccttcagcgttcgactttgccggacgctgaaggccattgttgtactgcgctgttcgtattttatggaagtgacctaacttatgtcacagctcttttattgatgggtccgatatccagctgcctgagcatcagctaatgaatcaaaataaacgacattttcaggagcaatcccagaatatggatattgccccggtaagtagcaatacattgttgaacgatcaccaataattgaatttggttcatagttatccggatcaacccacggctctggttctttaccactcgcgggggctgtatttccatcattaggctgttgagttgttgaaggaatcgttggactactattatttgaatagctcttctcatcattcggttgctgagattgctggccgattatcgaagacccccgttgactttccttaccgctggaagatttgatgacagaactagttttttctttatttttagattcttttgtcgattttttcttcttatccgattctttagttgttttaactactgcatcctcttgagtctcctgtgcctgattacgactactaatgaaccatccgccaccaattaataataaaataactattatccataaccatggtcgacgataaaacggcttccgatgttgatttctgttcataactggcctcctttatctttgaactttcgatttttaacaaaaacgtttccaaattcattatataaaatcaccatagcgatagataggtaccttcaacgggattaattattttttagagaattggttataggatattcataaaagataaacattcttcttaaaattattaactataattaactaaatactgaccatcatcaagtaaaaattgcttaaataatggcagcgtaaattttagctttccatatcctgctggtgttatgagttgactatccattaaccgccgacgatacattccaatataaccaggctttttctttaattttgttcttaagcaactagttgaaacagggtactcagaagctttagccatagtaataacaaattgctgatccataatagataattcttcaagcatcttactataagcatttcgacttaattgggcttgatactctggctggatactatctatagttttcatcgtaatgtgtttatccggtgattcccataaaagataaccaagcaattgaaaggcatatgcatatccgtctgaaagaagagcggcgcgacgaaccacttctggcgaaatttccggatctcgtactttcaatgcttgttggtattgcgctctgatatcatagtaattcagtggagaaagacttattcttccactacgtaataagaaagttaatacatgattattttgcaattcttgaacatttttgggtaatccagtcatgattattgagattggtaacccctcactaatcatgacttgatatactgatgctaattcaaccattcccgttacctcttgagcttcatcaatcattaccaatactttctggttatttttgtctaatatttttaacattttttttaatacaagttgaaaatttgatgtttgtttatcattaagagtgaattttaagcctaatccgcctatttcaaaattaatatcggagagttggtcgaatacttttttgattttatttgttgattgttggtaaatcatttcagccaaacgtcccaccatattatctccaataattaagtgaatagttatccacgtcggatcttgatcaatctgctttccaacagaattcataaaaactgtttttccaactccacgatttccataaatcaaagtagttcgataaggagtatcaagcgctttaatgtctttaaccaattttgattgtacttcttcgcgatctaataacacagttggttgaataccaaaacttggattaaaaggatttttcatattcttttcctctattttatatttctaatttaattttatatctgtttatatctttgctcaagttttatatctgtttatatcttaaattttatatgtgtaaaaagccaggtaactcccttctctaaaaaagttagaaattacttggcttttttatcaatctaattttctactctaataaaagtgatacttatttcatcatatttgatatttagaactagtaatctttttagctaattcagtatttactaatcgaatagctgatgaattcttataagaatttcccccaaagtttaaatcaccataccaacaaattttttgatcaaaaacacaaatattattaccaatttgttcttttaacttaaaatcgactttatttgataaaagtttatagtcacaatttctctgctttttacccaaagtaagggaaatctgactaaattttaccatttcattcaacatttcaatttgtttttgattaatcctttttaaacaaataaaggctttcttagcattagctagatcttgtctccatacctgcaaatagtcatttttagtatagtaagcagttgaataactattccattgcttactatggacaaaactatatccttgttgcttatagactcttaccctcttccgatacatctttgcaaatgtctcatcagcaatatcaacataatcatatacacgtaattcgtcttttttatctaggcttcgttctaatcgaccaagatattgctttgtattacctttccaagaaaaggtaacgttaaaaataatgtatctaaacttggtaaatcaaatccttctcccacatatttgccagtcgacaaaagaatatatgggtctttaatttttgataacttaatggataatttttgtgttccagtagtcaaatatactttgctatttttctgctttagttttgcgtaaagttcattaagatgtttaattcgttcactcaacaataaaatatgtcttccttcagacaatgcttggagtgcgtcctttactatttgatcattacggtcattattttcagcaatcaaccttatcttttgcgcataagtatcacgttctaatttacttttagcttcaagaaaactattataacgcggatatatataacgagaaatcaaatattctttttcactatcttgagcttggtagataatatttccacaacgataatacataaaattttctaatccatcttttctttcgggcgttgctgttaaccccagaacatatcgtgtgtttgcttctactaaagttttttcaaaggttaccgcagaaatatgatggcattcatcaacaattatttgttcatagtcttgaaatagttttgtacgctcaatagctgataaatggattaatttacgaatattaatgatatcgactaattttgaaggatgattacgagttccagaaataatttcaatttgttttttcttaacgcatcgtccagtcttagttaattctttatatggcacatccttaattttcaaaaatcttaaagcagcatctcgccattgattagcgatgttaacggtagacacaataatcaatgttcttgctttacgccttgcaattagcgcacatccaacaactgtttttccaaatccagtatgagcacacagcatccccaatttatttttatcaattttatttactgcttcttcttgttgtggccgtagggtacctgtaaattcaacattcaacgctttggacagagtaaattgttcttttaaataactatgacaattatcttttaatgacgactctactcctcgtggcaatcgtaaatatttaccatcaatttttgctgctgttaaaattgatggaacatcccacacaggcatgcgcattctttgtctcttaatatattctggattactaaaagtagctaagtttaataatgataattgctcttgacgcgttaaattttgacgattaataaatatttccccagcaataaagccttcaacttttttaggaaaattttgcaaaaacgggataattaatctagagttttcgccctttagaattttcagatctttagtaatttgactaatgaaattttttacttcttcttcactatacttttttgtgttttctaattggtcaaataactgtgacagtgctaaaggctgaagattattatcagtaaaaatagactttttctcttttacatcactccattttaatggcaaagcaatcaaatttccaaatcctttttcaggtaatcgatcttgattaggaatcatacgatcaaatgatgacaaatcaagactttcactagtaatcatcgactctactaaaatcaatttaccaagaaacctagctgtacttgccgcaattggttgactaaaaaatatccacagatgataactattaccagatgatgatatttcaggaagacagttaagatcatatttttggcaagtcttaattactgccttagtcattttataaggttcagcggttgattgatgtttatcaaaatcaaaaactaataactttgttttatcatcttttaataaaggatagatcccgtaacgatgatatttatctgaagaagaaatctgctcataaattactttcctagaataaggaagatattgtttcttcaattttgacaatgcttctttattatttcgcaattgataaaagcttcgccaattttttaatgctggactatatcctttaccattactccacttttgagcaaatacatcaggacgacctgcaaaataatcagcatataatgctagtttttcaccagttgttcttttcttagctataagacttaataatttctgttcactaataatccaatccgtccctttatcagtggtaattgagtaaaatttttctttagtttcgtaatgccaatatgcttgagtaacggtaatgatatcaccgttatttaacgcgtattctttacctatttccatgtagtttaactccatttagctagctgctattattacccatcaagattctcgaaactttagattagccaaatcgtttaataacagtattaatatcatctcttaattctttactgaggccggttaaatcttcatctgtaattacattctctgataacagctgcaataaagtctgaaacatggatcttttcgatacttcaacaagcacctcgggcgattttcgatccgcctttatttgtttttccagcttccaaaatttattcgctgccgaaccatcaccatctaatattcttttgtattcctgattaaggcgattcatatatctttcttgccattttggaagcagcttgttgaataattgccaatcgcttttagagatatcattcatttcttcttacctcgtttttactttaattatacgataaatcgttttatgaaattcaacttcttttgcgccttataccaacaccaaagcctaatcctactctaacatgaatccacattcaaagatggtattaaagtttacatagcactcagctcttcgaatttgggtgttatttttagttaaccataattgcatttcatattcatatattaaccacttatctttctatcaatcacaaatattgtttttactgatatattcacactatcaaatatattaggaggcattttaatcatgttaattaaggcaaataatcttactaaaagatacggaacaaaattagctctagataacataaatttacagatcgatcgtggtcaattaattgcttatctaggtactaatggtgcagggaaatcaactactatcaatcttcttactggtttaatgacgccaacctccgggatgatcgcacgccgtcaaggaataaaaattggcgttgtcttccaagatagcattctcgataaagagctttcagttaaagataatcttaactttagatcaaacttatatcatgaagatcatactgaatgggttcaccagttaattagcctaatgggcctcacccattttctaaatcagcgctatggaacattatctggtggacagcgacgcagggttgatatcaatcgtgccttgattaccgacccagatattcttttccttgacgaaccgacaactggattggatttacaaacgcgacttgttatttggaacctccttcaaaagctacaaaaggaacatggtctaactatttttctaacaactcattacttagaagaagccgaaaatgccgatcaaatgtatatcttagaaaacggcaaaattttagtttctggctcagcaaccgatattaaacaacattatgcaccaactaaattagtggttacaacaaatggacataagctacaaactaactactctgagaaacaattaacacctcaaaaattttcttttgatggccttaattgttcagaagttattacattactacatagcaatcaagagtatatcattaacttctcatatacccccggttcaattaacgatgcttttgtcaaaattaccggaaaggagcttcaataatatgattgcgttaattaaaaaaaacttaaagatttactttgctaataagattggtgtcttgatgtcttgccttggtgctttaatttcattctttatttatattggttttttgcagcaaaacctgatatcttcatggcaatcattgcctcatacaaaggaaatgttaggtttatggatgattagtggaattgtcgccatcgccggcattaccacttcatttcaagctcttggacaattagtcaaagatcgagaaagccgaacatgggatgatttaagtctaactgatttgacaccgttccaaattaattgtagctatttaactgcaacaatatttattagcacattaatgcagattattacattcttcatcatggcagtttactttattttagtagatagtattactattccaactactgcattgcttctcggattattttttattgttttaggtgcaattggcgcaagtgctgttaatttaattattgttgacctaatccattcttctacgacttttagccgcctttctgccataattggcgcagcttccggatttatgatcgctacttatatgccctatggaacattatccaaatcagcacaatttgtagtaaaattatttccaagtagttatgaggctgctagcttgcgaagccttctgctaaataaactaagcaaaaaatttttaccgccatccagtcggtaccaaatgattgaatatctgggtatccacttcaagattcatggttatcagttaaataattatagtaatgcattaatgattgtgggaatgtctatagttttaatagatcttggagctgtttgggcaaatcgatatcagaggaagagttaattgtgcaaattcattttcagtcagatccattactaggtcctgacgatcttaatattactgtgaacgctgttactaaaaacgacaaagttattaacctgcttaattatttagataagtatgatcaaaaaagtagctctttaatcccaataaaaacagaagataggattttaactataaagcaaatagagcttatcaaggtagaggtaaccaaaaacatcctctctttttatacaaaaagcgatgtaattcaagcaaacggacgactatatcaagtattaacaaggcttaacgaaaattttgttcaagtatcaaaacacggcattattaatttaaatcatttactttccctagaagctggatttactggcaatatgattgctaaattaaattttgatcaacgtgccgatgtttcacggaaatatctaccagagttagaaagaagattgggactataaaatgataaatttaaaaaggggtatccgttactttattcgcgggatgggttatggatctattacttatctcgcaattattgcatttctcacacataatatgactgtttctactactagtgtcattacagtgttcattattagtggattgatcggggaattaagttttgtctttcaaacagaactaccgtattcgatcgctctcgttattcacctaatcgggacctttattctatattctgtaatgatgctaatcaatcactggcctcttaattggcaaaccattgtaattttcattatcgtctatatcgctatttggctttttattcgtttgttagaagagcaacatattaatcgaattaataagcaaattagaaacaggcaaaaataaattttgtatcgcaatcatcgcttcgttactaaaatgaggtgatgatttttgtataggttaatgtccatacaatcagatgtttgataacttcttagtttcacatttgcttgtcgatctgtcattttgctgcctcccttaacacttttcttttatataaaacgttaagtacacgattaccctacaaacgcctacttgactatcgaaatagaacatagaatactcgactagttagttcaaaatagaaagaatcaccatctttcaacgttacataaagttcacgttcaaagatggtgaagtggttaatttaactatttaaggttaagttttcaatgcaatgatcgccattattatctcattgaaggctgacaaagatttccgtatatctgttaccttacacctcttacaaaaatagtgaggcgaatcatttaattaactggtttaattcgttgatgtccacagtatcaaggtcaattggttctccacctaaccagtctaaaaagtcaggatcaacttgccctttttggtaatcatcataatactgctctaaagcaccgacaccaccaacatattcaataataccgtaaccacgggctttttgaacatgtggtagctcctcattagtaactggttgaattttttggacatgaagtttaaactcccagccgtccccatagtcataatgaatagttaatttatctttttcatttaataatgagaccgttgctagatcaagcttaacttttgtcatcccgcctggcacaaaatcttctgactgagtataaaattcctgagtctgttcattaattgcatcatacaagtgtcccaagttaccatgaaacatcaaaatcactgtttcagcgagttcctcaattgtactactacccttaatcacgaacgtacggcttgctagcggtttaaaatcagctaatttagcagtaattacatacgcttgaccatagttttgcgggttaatcaactgacggttgccaacattcgttggtatatctgcttgtgctggagctagttcgtcaagcaactgctgaataaatttatcttgatagtcatcttctggcgcagctaattccggttctccatagataatatcgtagcttgtatctagatagtctgcaacatccctagcagctgattgactcacgatccctgtgtgacttagacaaacataaaaattggataacgtaacagaaagaagatcctcatcaatttgatctaacgttccagcgaaaaagatgtttggcgcagctaggttagtagtgaccgtgcaaattttatttttaacatgaagtggttcaaaaattggtccaagatacgacgagcagtcttatcatctcccattaactgaccatcagcactggcgataaactggtcaatcatttgctggttgttttggctaatcgcttgaactgttgctggattatctgctgaggcttttccttcgtcatccgcccaaatacggggatctttaaattgtggcttgatcgtacaatattttgcccccggtcgtggagctttcacctttaccggatattcttcattaaccaattggcaaaatttcattaatacttcctgatcatttccagatagagctaacaataagtagacaagatcattgaaatcctcagttgatgaaaaatcatcattatcgttaagggtttccttaaattctgcttggtggctagcaattatctgcaaataatttttaagtttttcgttttcagcagatgagattggccggtataaattaaatgaaaaaacattctgcattaaccaagtacgttgtggatcaaccaaaaaaggcatttcatttagaaagttaatggcaacttgactaaacttaccctcgcctaatttgtcagtaaagactggcaaaccagtttcctcttctacataataggtagtatgttttattatcaatctttaccagactaagccgccaccgtcgtaaaggtttttggctaatcttaccagtattattataaggtagtcgatcagccaggtcaggactataaaataactgtgccatgatgattgctcctttatttttgaatgtgtgagaaatgaattttattcgcgctctataaaagaaagcgaagggaatatcatctatagtttacagttgtaagaatgtccaagcaagttatgatccctgaacattaatccacagttttagcaattttttgatagtattaaccattttacttaaatcgatattgggcaattttttgcaaataactttggcggcgttgcggggatgaccaggaaatcccgccaaagttaagccacttccgatgctcaaagccaagttgtttcaaggttgtattaacaaatactcgctgaatatcatccccacagaaaaaccgcaagtaccaagttggcgaagttgaagtagttaatacatagcaatgctggacattcgtcaatagccctttaattccggtcctggttaccgtatgggagagatcggggccctctttcatcaccttatcaataaccccttttaacattccgggaatactattccaccagcaaggagttataaaaatcactgtccgacatgattttaagagttctaaatatttgcgcaccaagggatcaactgtccctccttgatgatacaatgaaagttcttccgcagaataagtaggatcaaaatgttccgcataaaggtcaattaattgaaccaattagtcgaaaaaagttagaaattaacgtttgaccatcgagttcatgttggatttgagttatactttttattgtgcaagacccctttatactttgtttttggttatttaaagtatagtccaaaggggcttgcttttttaatttttcgtagaaaaaactgatagcctcgcctgtttgacatggttatcagctttcaagtttcagttataaatgaataatttggatcgttcgcaaatgacgcgtgagtttactatccgcttccaattgagcaagcgtccgcgataatgtttcgggggttgtcccaaggtatgaagaaaggtccttgagtttcaagggtagcttaactttcgaactctgttgatcaaccatcaattgtttcagataagtcactacccgttcttcaatgtttggcagtcccatcagccgtgtttgctgacgaagactttcaatcattgctgcctgtcctgccattagttttaaggtaatttcgctttggtggtgaatcaactggataaagtcttgccgattaagactacagatatcactgtctgtagtcatttctacataactactatggttggcaacccccaggagccaggtttcaccaacataatcacctgtcttcagcattcgttgcacccgttcttcaccatcttcacttagttggtacattcgaccatggccactttttacaatcactaaccggtcatccatgtctggactcacaacaattgttccgcgcttaatacgctggtgatgaaccagctgttccacttggcgctggcgttctaaactcaactgattaaagagcggaaccaggtgaacacaaagttcttctttcattagagtatcctccatcattcgggtgttagaagtcatcatcatcttcttcagtatacaaccccgtccgtaaatcatgccccaagaagcgctgggttaaagcaatttgctttttgatccatgacaataattccgttaaatctactgctaattcgggccactcttctttattgccaagagcaatggccttcgtgataaagagaatctgcgtgtcaaaatcctttaccaaggcaaataattggtcatcccctggcaaatacttatcagcacccctttcttctagcatggtaaattcacgaaactgatccgtcgtcgttggaatactctcaccattctgaactagcagctgattcaggtgattaaatgcttcctgttcatgcgcaatccaatcatcgccatattgggataaaaacaatgccgcattccctttcgtaaacagctttgcctgactaatctttagtgaatgaattaataagttggcaatgatatgacccgtcatcgcccctgccgttggtgtatggtgatcaatatcgctctgttttagttcctgttgatactgttcttcactagtcatctgatagctcctttaccttaattccctgaaccgtgtatcccattttttcaatatttgcttgaacatcatcgggtgaagctttggccaaatctagtgtaaatttaacctttcccgcattgaacagtaccttcacgtcatcggtcccgtcaatggtttcaacacttttttgaatcttagttaggcatgatggacaagttaaaccatcaagtttcatcattactttttccatggttatcactcctttgttattttcattgtaatttagccaccgtaaataaaaattgattatcatcaattttgagaaattcgtttcatcaaccgcatactgttcaaaataacaatcagaatactaagctcatgaatcagcattcctgatgccatttcgatataaccaacaaaaagtccaataaacaatagcactaccgtcagtaaggcaatcaagatgttttcattcatattggcgatggttcgccgtgccaagcgaaaactggtgactagactattcagatctgatttcacaagtactaggtcggctacatccattgcaacatcagtaccggaacccattgccactgcaacatcagctgcggagagtgccggactatcattaatcccgtcaccaataaatgcgatccgatgaccgtcagcctgttgttgtttgagatagtcagctttcccttgaggaagcatcgctgcgtgaacttcatcgattggcagtttagctgcgatctgatgagcggttccttcattatcgccagtcaacattatgagtcgtttgacccctaacgcttttaattgtcgtaacgccgattgtgcctgtgatcgtaactgatctttgataccaaagattgccaattcatggtgatccatgctggcaaaaataacaatcgaatttccatcactcgtcagttgatcaatgagttggtcgagagttgaactggtacctaataagtctttaatcagggttggattacctaataagtactcaccttcaccaatttgcgctcggattccctgtcccttaatcgtttgaatatcggttggctgataatcgtgcttcctatctagcttgccaattgcttgtgccaacgggtggtccgatcgttgttcaactgctaccgcttgatcaataatcgtctgtcggtctccgttcagaacattgacactagtaacaaccggcttcccgacggttaaggtacccgtcttatcaaaggcaatcgtgtcaatatgcttcatccggtccatgacatcggaacccttaaagagaatcccctgacgagcaccattaccgattccagcaacagtagatgcagggacaccaatcacaagcgcacctggacagccaagaaccattacggtaattgctaaccgcacgtctcgtgtaatcaagccaaccataattgctaccaatagcacaactggcgtgtaataacgggcgaagcgatcaataaagcgttgcgtcttcgtttgcgaatcctgagcttcttccactagttcaataattttaccgaacgtagtatcttcgcctgccgcggtagtattcaccgtcaccgtcccattctccaaaatggttcccgcaaaaactgcatctccaggatgtttcttaactaaccgagactccccagtaatactggcttcatttagaacggcagtcccagtcttgatcgtgccatcgactggaacctgatttccagtcttaattaagaccatgtccccggatcaatgaagtccacatcctcatcactggtattgccatcttcatcaatcaccaccgcggtttgaggagcaagttcggttagctgcttaattgccgaccgtgtcttccttaaagtagcgttttctaatacctcaccaaccataaaaagccaggtaacaatcgccgcttcgttatattcgccaatgataaaagcaccgatcaccgcaatactgacgagaacatcaatcgatatcagccgtacctctaatgatgaaatggctgtgaacaaaatcggcaatagaccgatgacccctgcaatggccattaggatctgatacattaagttatttgagctgataaagcgaaaagcttctgccagaattaataaaacggtcaagccgatcaccaatgcttgccgttgctcagtcaggaatcgttgtactttgaccatatcggcacctccttttactgtccttagtataagaaaagaagccagtaagttacttgaccgccatcaagtttggtaatttaaaaagcctcataattggattaaccaaatataaggcttgatacgtgtttctacttatttaatttgctaatgatttcattaattaaatatttgatttagtttgaatcagtccagcaagatatttaccatcatcaatactcattgtggatcgatgattcagccaaaagagaagtaacttgataatactgtccacatacagtgtttgaaaaaacttatagagagggaccttttgaatttctgctctagtcgtgttgaataagtacggagctcgttcaagaaattcatcgtttgccaagttaataatcgcatggtatagattaatatcgccattgtccgataataagacagccaatatatctttacgatcatcacaatatttaagggtcacattaaaagcagagttagctaattccataattttttgttctgatgcattatgagtatcttctagtgatgtccggtctttttgcagcgcatttttcaagctaatgaggatattcgtctctacccagtggataaaatccttcttatttttaaaataattataaaaggtcttcttactaacttcgacttgattaataatatcgatagttcgacattcacttaacttttgtgttgataaaaccttaattaatccattgaggattcggtttttagtattgattgtccgaacgtccatttatccttgccactcctattccatatgactaagcgttttcattatagacggtcggcaatattattacattaaatctcggttttcttacacgctcagtttacatttttactcatttattctgtaatagcgtccctaactttattaaacataagccaataacagccccgatgaaaagaactaattttaatattcaagtactggggttcttacttcatagcaggcagtcaaaattcattaaaccagcgtcgcacccagtgaattcttaaaatggtcaagcgcccactcctgaccatgcttggtaaaggtggcgacccccttaaccggaatcgtaatctggtagttcaaattataggcggcaattgcggtgtgcaggacacagatatcggtgcaaacacctgtaatccacaagttatcaatttttcgttctcgcaggtagttatcaagattagtattttgaaatgatgaatagcggttcttattaaactggtaaacccggtcactggcctgatgttgttcaaaccagtcattaaccttgccgtatagctgttgaccaggcgtaccgaccacgttatgtggcgggaagagtttagcttctggactaaaccggtccctacaatgggcatcagtcgggaaaattacgtagtcgccattttggtaaaaacggttggccagctgaaccaaataatcttctaattcctgcgctggcttgccacaagtaagcgcaccattgtcagcgacaaaatcgtttgtataatcaataattaataatgctttagtcattgctaactccttatttttgtgcctcatcaaccagcttttgttgcatgtcagctaaccgcttggttaaataaactgggaagcggtccggattaagcaaccgcttagtagccgccggcagctgtgctaattcggtctgcgcaaaatgctggatggcaaaagtgtcggtttcaattggcgccgcttttttcagtgtcaaaacttgcttaagcagtggcttagcaatgaagtcagttagaatcactttattccgggtgacgtgaatgtcagcattgattgccgcaatttcggttccaatctgctcgtcagccagggcaattacatcggcaatagcgtgttggggattatgcttatcgtagagccggtaaatctgcttattcccagggagcgtaatcttttcgcgactattactaatcttgatctttggcacccatttgccatcattttctagtgccgacattttataaacaacgcttaatactggactggatgaactggtaattagtcgctcaccgatcccaaagttatccagtggtgccccttcatcaagcaatgacttaacaatgtgggcatcaagggcgtttgaagcagtaatcttagcgttggtaaaaccagcctcgtccatcatcttccgagccttggctgccaactgggcaatatcaccagaatcgatgcggataccaaccggttcgtggccagctgcccgcaattccttaaagactttaattgcgttcggtactccagagttaaccacatcgtaagtatcaactaacagggcagcattgtcagggtaaattttggcccaggcacgaaaggccgttaattcatcaggaaagctttcaatccaggcgtgggccatcgtccccgccgccggaaggttaaacagcttggcagctagcacattggaggtactactgcacccaccaataatggcagcccgcgcaccatatattgcggcatcaggcccctgcgcccgtcgtgcaccaaattccattactgggcgtccgccagtaacgctggtaatctgccatgccttcgttgcaatcaatgattggtggttaatgatgtttaagatcagggtttcgagaagttggacatcaattagtgggccactaatactaaggattggttcctgtgggaagactggcgtgccttctgggattgccttaattgagcagcggttgtgagctgctgtcaggtaaaagagaaagtcgtcactaaagtggttaagggaccgcagataagcaatgtcaccagttgaaaagtgccagttcttaacttcatcaattacttgcatcaatccagcactaatcacaaaactgccatcatcgggcgccttacggtaaaagacatcgaagcgcgcctgcttatcgtggggaagcgtttgataataaccgttggccattgaaaactcatacatgtcggttaataattcatgtttcattattaaataactcctaacaagtttaggtaaaaaatactttaactactgcaaaaaataaaagtatattgaacttttattatcactaattgtagcacttttatttttagacgcaaggtagtaccagtttaaataactttggtggccggcctgaccgctttgttgcggcggtaccaacttccttaaacagcttttggtgggtctttttaaaattagaattatcaatttgatcgaccgttgtttggcggaaagtagcataaacttcgcgggcttgccgaagggtaaaagtcggtcctaagatctgtaaaatggttggctggtagtccagtttatttttaattcgtacaatggccgtattaataatttggtggtggtcaaatgcaagcgccggtcctgcagccaaactcaaaactaagtcaccattttgcaagataaacttcccgtggtcaaagttaagactaaaccacccgacttcggttgctccgtacccggccctcagttgcggcattgtcggtaagaaagtcatgtaggcaatcgccaaggcccgcccacggcttacccggtcgggatcggtgaaggttgccaactgttcggtagcactgtttgatagacgaacaccaattttatccttaatcaggcggatacaggcagcgtcagcactttcatcccgccacaatagggtttctggtaaagcccagtggccctcaaatggcggataagcccgtttgaccagcaggacttgtggtaaatgggtcaagggattaaaactccaaataatatttgcaatcgtaattagcggatgcgcaacaactttgtcagccatctctttcacctcacaaaatattatagcgcaatcaagaatcacaataataaaaaatcgacaactaaggacggccttagttattgatttaacctaaattaacttctttaattcagcaattgctttttcgtagtctggttcatcagttaattcagttacaatttgccggtaaacaaccttcccatccggatcaagaatccagactgaccgcgcaaggattccttcatctggtattaacagctttgattcgtaaccaaaggattcttccttgtcagaaaccaattccatgtttttgacaccttcagcagcacaccacttctgttgatcttcagtcgtgttagttgaaatggtcaggaaattaacctctgggaattggtccattgttgagttaaaccgctgtgtttgaatgctacaaaccggggtgttaatatctggaacaacgcttaagagagttattttgccaagcaattgccgggtcttaaccttgtcaccattcttatcaaaaaccttgaagtgtgggaattcgtcaccaacagctggtggattgcctactaattgccgcttttcaccattaattgtgatttccattcttagcaactccttttctaattttggttaggtacagtatatcaaaaacgcaattaaaaagcattgattatactcattgttttagaaaatttatgagctgtgtagctaggcaaggtatcttttaacctcgcggtttgtaaaattaagttagaaaaataaaaagccatttgtggtagacttttgaatacccatacatcaaaagaaaggacaccacaaatgacctaccatcatcttaccatagacgaactaacgatgatcgctaattttcgtgaccaaggagtaaaagcctaccgggccgccaaacttttgcaccggagcttagaaaccgtctaccgagtttatcgctttctggccgccggccacacgctccaagaatattaccaacactatcgtgaaaacaaggctcattgcggtcggaaggctattcaattgcccactgatgaggtaacttatatcaaagccaaagtggctcaaggctggacgccagacacaattatgggacgcgctgaacggccactcagctgtagtatgcggacactttaccgccttttcgaacggggcaattttgatgtgcggaccttgccgatgaaaggcaagcgtcgccccaatggttacgtagaacggcgggggaaggccggtcaacttggccaaagcattcaccaacgggctatcgactttcccaactttaaccgtgaattcggccaccttgaagccgacaccgtccagggcaaaggacatcagggcgccgttatgactttggtagaacggacttccaaagtcgaagtgattcttaacgtccatagtaagacggccaccagtgtgatccagcacttacaggaatggttggcaaagtttccaccccacttcttcaagtcgattaccttcgacaatgggaaggagttcgctgactggcgagcaattgccaaccaatttgacctccagacctactttgccgaggtgggggcacctaaccaacgggggttaaacgagaacaacaacggccttctgcggcgcgatgggctccacaaaggccgcgatctccgccacctagctgatgaagaggttgctcaaataatgagttaccggaacaacattcctcgcaagtcattgggctatcaaacaccttacgaggtattcatgaagtatgtcactgatgagcaactactttttttctaacttaaattgacatttcgggcctaaaataggcagcgttaccttctaaaaggacttaatgtgttaactaactgcctttatatttcaatacatcatactaaggtaaattctcctaaattttataaattatgcaactgcaaacacatagaaacaatgcctataaatattgatataccagtcatttgaagtataacagaaaaattagacaaagttaaatagttaaactcgtaaggcatggttccggtattcaaccggtgtcatgccttttgtttttaaagagattcgttggttgttgaaacgatatacatagtttaaggaaagctttttgaactctccaaaatctttacatggcgtaaatccattaaacagttccgttttgtataggtgaaagaaactctcaatgggcgcattgtcatggcaattgcccttacgggacatgctttgaacaaaatgaagattagctagtgttttggcatagtaaacctgctgatattgccatccttgatctgaatgaataataggatgggcattatcaggtaatttttgcagtaattcatcaatagtacttttgaccagttgtagattgggatgataacttacttgaaaagccagtacttccttactagcttcatcaaccatagctgaaacataagcccactgttgattagctagtcatatctgagtgatatcgatgtggatgacttggtatggtttcgttgctgtaaaggattgttggagaacattctgtgcaatttttctaacagtaccgcgatatgatgaatatttaccattacggtgttggttatacatacttacttggacgcctagctgacgcatgatgcgggtagctgtggcgtcggctaagtgaatcccgtcttgatcaagtaaagctttcacgcgacgataaccgtaggttcgtcgtccgcgataaagcccctgcttgctaatcgccaacactcgttgtttaacttgagcgtatttatcgtaagggttagcgatgcgcttccgctcatcgtaataagttactctcgataatgagattctttggaggagcttaccaaccgagtgacgctgtttcttaggaagcttagcttgatgagccctgatctgatccactatttgtgttttttgtcgagctttgagggtccgaacagggccaacgatttttttagaatatcccgatccattttgacgtcatacaattcttgtttggtttgcgccaattcttccttaagtcgttcaatctcatttttattgacttgtttctttagcgctttccggtttttctttttcactttaggtggcctacctttaggatgaggctttaatgcctggtaaccgccttgatgaaaatctcgtttccaatgactaatttgattaggcaagagatcatatttggctgctaccatcgccattgattcctcatgagtttgatagtagtttatcacgctcaatttgaaatcagcactaaaggttcgcttcacgcgacgatgttgaaggctggtgattccttgaagtctggcttgttcaatccaatactgaatataatggtgactaagatgatattttttagctaactggtatgaaattaagccatctgttgcccattcacgaacaagctttaccttgaattcagaactatatttagtcacgcggtttttcaagttccataatttttcctcaaaatcatcataaattctatttcgagtatactactgtccagataatttataatttttgaatctaatatttaatatttaatgagtagtattatactaatcaactcaatcgtttcacctaaaatccaccatttcttcatctgtcataattccgctcatatcaactgttccaactcttttcactaccctaatcaacacgacctgccaaaatggacattcgtacacaccactatcgaaataggacattgaacactcgacctgccagctccaaatagaaaagtgtactaatcccaatcttcaaaatcagaatttgtacactttcaatcagctatagatgccgtcatgccggcgtttatcggctatttttctgtacgttccaggacagtaacagattcaacatgcgtcgtctgtgggaactggtctactggctggattggctttgttacatggtagccttggtcagcaaaacgcttgatatcgcgaactaaggtagcaggattacaggaaacataaatcactttctttggtgccatcttaccagtagcttcgatcagactttcagcaagccccttccgtggtggatcaacgataataacatctggtttgagcccttctgcttgccacttagcaaattgatcttccgccttaccaacaacaaatttggcattcttaataccattccgtttagcattatgtttggcgtcttcaatggcggcgggaacaatttctactccataaacttgcttagcgtgcttagctactgccagggagatcgtgccaattccacaataggcatcgatgaccgtttgattgccgtccaagccagcattatcaatggccgtttggtaaaggcgttcagtctgttgcggattaacctggtagaaggacagtggtgagattgcaaaatcaatcccaaggagctgatcatgaatttcatcagcaccccataacgttttattcttatcaccaagcaagcggttcgttcgcttatcattgatgttttgcacaatactttttacttctggcactctggcaacgatcccgtcgacgatttgcttttccattggtaaccgcttcgtattcgtgactaagactaccatcatttcatggctgtaatatcctcgccgaaccattactgtgcgaatcacgcccttaccagtttgttcatcatatggcgtaatgtggtattgccgtaataagtcacgaacaaccgcaatggctttatcaatttctggatcctggatatagaaatcttcaattgatactaaattgtggctcccccgcttataaaaaccggtttctaattgaccgtggaccattttgactggtacttgggccttgttgcggtaatgataaggcttttccatccccatcgttggcaaaacttcaatctcatctaagtgtgctttggccaataattcttgaatttggtgttgcttgaatttcaactgggcatcatatttcaaatgaccaagcggcgcgattcccgtttgaatgtattttttatccttaacatcaacgcggtctggactcttcgtctgccagtccattacccgtccccaagcaaagtggctggttaccttggtgatctttaccgtaatctcttcaccaggaagggcattaggaacaaagacgggaaaatcatcaatcttaacgaccccattgccctcgtaagataaatccactaccttcgctggatattcttcatttttatgtactggaatgtttaatttcaaagttattcctccattaatttcaacgttacaaacttctcctattataacaaaacaaacggccaacttcctctttgcgaagctgaccgtttatttattctatttctttttgcgatctttataatcgtcaatgccattcataaagtcttcttcgacccgcttaaaatcagctgaggttgtaatcgcatcttctggaatctcatccaagttagcaattacttctaggtgctgcttaaggttatgaaatttcattggcgcgtcgccaccatattccccgtccaggttaaccatcaagcggtcatccttgtttagcggaataacttcaatatcggttgctttagcataaataatacgcggatcatcaaggtgctttccttgaagcgccttcgccattaagctgagcatatcgatcacactgctcttcttaacgataatcatcgtaaactttccatcatcaagtgatgcatccggcacaatctgttcaaaaccgccgaccgaattagtcaaggcaatcataaacatggaagcaccgccccggtattcctgattatcatacttgattagcatgtcgactggcttaatccgcggcattaactctgctcccttggcgaagtatgctgcgtaaccaaagagggacttcatttgcgaagggacctcataggttaattcagtcatcgttccaccagcagcaatattcatgaagtagttttcaccagcccgaccaatatcaatcttaaatttcttattcttctttaagattaacttagccgcggcgatcggatcatcacgaggaatccgtaatgcccgtgcatagtcattagtcgtccctgctggaataatcgctaatgttggccgatgttctaacccagcaattccattaaccacttcattcagagtaccatctccaccagcagctacaatcaaatcaaaaccgtcttcagcagcacgagtggcttcgttcttagccgagttaggcgcaggagtagtcgcaaaagcactagtttcatatccagctttctcataaattgcgagaatatcaactaaatcacttcgcaatgtttcacggcctgaggtaggattataaattatccgagcacgttttcgcacggtcatccctccctactctatttagccttcaaagacttcatcaataattgagtaacaacttgtgggttagccttaccacgcgtttgcttcatgatttgacccattaagtagccgacagcccggtctttaccattcttaaagtcttcaattgattgttcgttgttatcaagaacttcatcaacgattggctgtagttgcgcaggatcagataactgaacaagaccgtgttcctttgcgtaagcatttggttcttcaccatctaagattcccttgaagaccttcttagccatcttagaagaaattgttccgtcttcaatcaacttcaccataccggcaaggttagctggagtaagcttggtatcttgtaagtcaacttgcttatcgttcaagtatgagtttacatcgttcattaagtagttggctacccgcttaggatcgccaccgttcttaacagcttcttcaaagaaatcagacatttccttagtctgggtaagaaccatcgcatcgtaatcagttaagccaagatccttaacatagtgctcacgacgctcaccaggcatttctggcatttcgctttcaatttcgctaatccattcatcgctaacgtttactggtggcaagtctggttctgggaagtaacggtaatcatcagaaccttcctttgtccgcatcagaatagtctcaccagtcgcttcatcataacgacgtgtttcctgaccaatgtgtccaccagccatcaatactttttgatgccgtttttcttcaaatgcgagggccttccgaacatagttaaaggagttgatgttcttcatctctgtcttggtcccaaacttatcagaaccgattggccgaattgagatgttggtatcaacccgcatggacccttcttccatcttcacgtcagagatccccgtaaattgaatccgttgacgcaatgcttccaagtaagccactgcttcttcaggcgaggcaatatctggcttagaaacaatttcaattagcggtgttccttgccggttcaagtcaacgtatgaatacttgctggtgtgagtgttcttaccagcatcttcttcaatgtgcatttctttgataccgatctttttctttttaccatttatttcaatttcaatccaaccgtcatgagcaattggagtatctgattgagtaatctggtaggctttcgggttatcaggatagaagtagttcttccgatcaaagtgcatgtgatgggcaatttgagcatgaagagcaagtccagccatgattccgtcacgaacgacacccttgtttaagcttggcaatacaccagggtacccccagtcaatgacattggtgtttgcgttaggctggtcaccgtattcaacgggggatggactgtaaatctttgaattagtctttaattcaacgtggacttctagaccgattgttgtttgaaagttcatcttagttttgacctcctaactttggtgtcttcttgtggaaatcagttgtctgttcaaagacatatccagtgttataaactgtttgttcgtcaaatgcttttccgatgatttgcagaccaactggcatgccatttttagcagagaaaccagcaggaatagacattgcaggaaggccggccatattaacgggaacagttaatacatcgttcatgtacatggtttgtggatcatcaatttctgcaccaatcttaaatgccgttgaagcaccagtagcaccaacgattacatcatgatccttaaatacgtcttcaaaatcttgggcgataagacggcgaactttagcggccttattaaagtaagcatcatagaaaccagcagagagagagaaggtccctaacataatccgtcgcttaacttcttcaccaaaaccttccgaacgagaacgaacataaacgtcttccaggttcttaacatcagcagctcggaagccataacgaataccatcgtaacgttggaggttagaagatgcttcagatgaggctaaaatgtagtaagcaggaaccccatacttggtatgtggcaaacttacttcatcaacaattgcgccgagggattctaagtggtccaaagcagccttaattacttcttgaacatcttcgtctaagccatcaaagtattcctttggcacagcaatccgtaagcctttaacattcgtattttcgtttaattgggctgcccagtctggaacttctttaagtgaggatgtcatatcccgttcatcatttccactgatgagggcggtcaacaaggcattatccttaacattttgagtcaaccagccgacttggtcaaaacttgaaccaaaagcaatgatcccccaccgtgatacacgaccgtatgtaggcttcatcccaacgacaccgttaaaggaagcaggcatccgaatagaaccaccagtatcagtaccaagtgcacctaaaacatccccggccgcaacagcagcagcagaaccaccggaagaaccaccaggaacccgggtaagatcccatgggttatgagtcgtaaagaatgctgaattttcagtagatgaccccatagcaaattcatcaaggttagtcttaccaacgttgatgtaatcagcggcatttaacttttcaaccactgtcgcgtcatatacagggttaaagttttcaagcatcttagaagcagccgtcgttgtgaggcctttagttaagatattatccttaactgcaagcggaacccctgcagttaattgatcagcactaatgccctttgcatcaatctcagctgcccgcttcagtgcttgatcttcatttaagctgatgaaagctttaacttgatcttcattacccttaatgtggtcaaaagtttcctttgttaattcagttgcactgattttcttatttaccaagtcatcgtgcaattgactcaagcttgtttggtaaaaatccattattcgccgtcctcactttcgtcaagaattgctggaaccttgatgtagccaccatcagtttcaggagcattgttaagcaaggcttcttgttcgtctttagaactcttaattgccttatcttcacgcattacatttacccgatcggttgctgatgtcattggttcaacgccatcggtatcaaccgcttcgaggtcttcaaacatatcaataatgtttcctagttgagtggtaaacttaccaagttcatccttagggaactcaagcttagcaagttcagcaacgtgttctacttgttgctcagtgattttactggccattctctctacctcttttccagtaatttaaaatctacatatacatttaacaattttagcacagaataggttcctatttcatccatgtagaaataaaaaaaggagttatcggttcgcattttctagtaacgaatcgatattctccttttttcatctttaataagaatcaaaaatatgcgactggaagttatcagaaccagcattccggtaaacaaccgcttgaatttcggaatcagattgaatcttaatatcaatcggaatcccattaggtaggtacttctttgctgcccgggtaatatattgggtaaaactagtaatttcactttgactatagaactgagtagtaacagtaatgtgcatccccgataaagtcccattttcatattgagcttgtgctgtaactccactcaagttagggaagaaactttgaatctggctcttaaagtttgagaaactatcatcatcagtttgatcagaactattagttgttgatgcactagcctttggaaggactacattcttgtaatttaacttccgccagctactaattgtattaccactattcttactataagcaaagaatgtaccaccaactaaactatcatccggtgcttgtttgtatagtgcaatcacgattggaacatttccaacgcctgattttttccgtactcgttgaagaaccttttgtgccgcgatttcaccttgacgacgaacctcactatcactaatcttcttagttaaagttggtcctcctgtcttagtttggtagttgtattcggaatttattccaatcccaatcgtaatcccccgcaatttcatggaattaccactttcttgcatataatcttgctcttcaatttgttgaatatagactgggttaggattgctcttctttccttgagcagggtttagcccttcaggattactctttgtttttcgaccaagccagttttcaatcgtcccactactaaggtattgaccttcttggaaaatatagctttttgttgaaaagactcgttttgaaacctgggtcaaaccactttcaaagcttttaaggttatattggttatcattttgtgagacatttataccccgagctttacttgttcggtaacgaccatttttaatcacaccttgataagtaccattacttgaaccagtcgttgaatagtttttcgatgacgactttcctccaaaaccacatgatgcaagcaagacagtacacatcaaaacggcagcactaacggctattttttttgcctttcgcttcacgatttactgttcctccttcattgcttggctgaattgctgttcattccatacgtcaatacccaagtcttgagcttttgttagcttactaccagcatcagccccagcaatgacaatatctgttttctttgagacgcttccggttaccttagccccgtggttttcaagccatgattttgcttccccacgagtcatttcagttagcttaccagtcagtactactcgccgaccattccattcactatcaggattagcatttgaccgtgagccaagataagcaaagtttaccccaacttctcgtaattcgtcaattaatttaataacctgttgattagcaaaataagttacgatactttcgccaattgttggaccaattccactaatcgcagaaatttcatcggcatcggccttcattaagctatcaaggtcaccgaaatgttccatgataattcgagcagcctttgcacctacatgacgaattccaagaccaaataataagcgctcgacagaattattacgactattatcgatcgatgtcaataggttagaggtcgatttctcgccaaatttatctaaagttaataattggtcatgattaagtcgatataaaccggcaacatcatgaatcaattctttatcccatagctgttcaatgattctaggaccaagtccatcaatattcatggcattccgggaagcgaaatgtgctaagccttctttaatttgcgctggacacattggattaatacagcgtaacgcaacttcaccatcaagatgaactaattctgagccacagaccggacacttcgttggaatctcatattcaactgaatctgcagaacgtttagttggatctacttttgaaatttcaggaataatgtcacccgctttatgcaggtaaacagtatcaccaatccgaatatctttttcacgcaagtaatcaggattatgcaaagaagctcgactaactgttgtacccgccaattgaactgggtccataactgctgttggcgttacattgccggtccgaccgacagtccagacaatatcacggacaatcgttgcttgctcttcgggagggaatttataagcaatttcccagcgtggcaccttaactgtattcccaagggcaacttccgtatcaaggtcgtttactttttcaacaattccatcgatcccgtaagtgagcttgtctcgttgagctgtatattcttcaatatacttctcaatctcttcacggttatgaacaactcgattattaggattaacattaaaccctaattctcgcatacgatcaagtgcttccgcttgggtcttcacccccaacttttgatattcaggaacataatatataaatgtatctagttcacgttgcgccgttactttcggatctaattgccgcaaacttccggctgctgcattccggggattagcaaaaaccggcaatccttctgcttcgcgtttagcatttaactttgcaaaagccgctttgggcatataacattcgccccgaacctcgatcgataatggttctggcaattctgcgggaactgacttgatagttcggacattagcagtaacatcttcaccaatcgttccattgccacgcgtagaaccttgaactaactttccattctcgtaaacaagtgaaagagaaagaccatcgatttttagttcgagattatattcgggttcaacttcaacatcccgattttcctgttgtcgttggttaaagtccatcaattcttcaatcgaaaagacatcccccatcgataacatcggaatttcgtgccgaacttttgttaattggctttctgttgctcctcctactcgttgggttggcgaatcggcagagagcaattgtggaaattgttcttccagctgtactaatcgctgataagcacgatcatatacatgatcctctacagttggattgtcttgttcataatattcttttccccacttaatcaattttgctcgtaatggcttaatctcatcttgagcttcttgaagggttaattcttttactggcgtctgtttttcactcatctcatccgcctcatttcattattttcgtactttcgtaattggggcaaaacttgccaataaccgctttacaccctgacttggaaaggcaatatctaattccatatcattaccactaccgttaactttgaccactgttccttggccccactttttgtgttcaaccttatcgccagttttccagccaaccttatcggccccagttccggtgttagtaattggtttaacccgcttgccagcactgcgatatgttcgcttttgctgatcacggtaggtagtagcggttgcggcagcacgatcaaatggcagtttactatctttaatgctattacctgatgggctattttcaaactgtaacaactcagaatcaatttcttctacaaatcgtgatggttggttacgttggatacgaccataaagcaagcgtgaaaaggcattagtaagataaagctttttctttgcccgtgtaattccaacataggctaagcgacgttcttcttccaattcatcatcttccattaaagctcgcgataatgggaaaataccttcttccattcccacaaggaaaacaactggaaattcaagtcccttagctgcatgtaatgtcattaaagttacagctggtgcttgttcatcaacatcatcttgatctgagacaagggccaaatcagctaaaaagttaataattttttgcaagttaggatcatcatcgtctttatgctgctcatcatattcttgtgtaaccgacttaaattcatcaaggttttcacgacgagcttgtgcttcaaggcttcgatcatcacttagcattttgttgtagccacttaactctaaaatctgttcagttaaatcagttaatgtgagatattctgcttgtttagtcaagttagccattaattgaccaaattcatcaattttatttcgtgttcgtgcagtaatttcactagcagtatcaacattttgagctgcctttaataatgtccagccattttcattagcgaaattgcgaagatgttccacactagttaaaccaattcctcgtttgggcgtattaacaacgcgttcaaagctcattgaatcggcaggattaacgattaaggtcaaatatgctaaaatatcacgaatttcacgccggtcatagaatttatggccaccaaccatcgtatagggaatactactcttcaagaaagtttcttcaaccatccgtgattgtgcattagtccgataaagaattgcaaagtcattaaagtgatagccatgcttttcttgttcttctttaatcttcgaaacaataaactgcgcttcatcatgttcattttgcgcgcggtaatacgaaattttgtccccttgaccattttctgtccacagattcttcttttttcgataaaggttattagcaataacttcatttgccgcatttaaaattgtttgcgttgatcgatagttttgctcaagcattaccgtcttagcttggggataatcatgttcaaaattcaaaatattgttcatattagctccacgccaaccataaatactctgatctgcatcccctaccacacacaaattttggtacttttgcgctaatagattaactaaccggtattgggcatcattcgtatcctggtattcgtcaacatggatgtagtggaacttatcttgataaaattcaagcgtctcttgatcactttccaataactcaatggtcttcataatcagatcatcaaaatctaatgcttgattagtttctagctcttgttggtaaagcttatatgctcgcgcgaccatgttttcaaacatactattagcttctttgctatagtcatctggcgtcaacaaagcatttttagcattagaaatcgcacttaaaatactgcggggatcaaattttttagtatcaatatttaattctgcacaaatccgcttcattaacgtccgttgctcacttgtatcagcaatcgtaaaggcgcgattatagccaattttttcaatatcacgacggaggattcgaacacataatgcgtgaaaagtcgatacccaaatctcattagcactttcaccaagtaatttaccgacccgctctttcatttcgcgcgcagccttgttggtaaaagtaatcgctaaaatattccatggtaatacaccattttcttcaattaagtaagcaacccggtgtgtaagaacccgtgtctttcctgatccagcaccggccattactaataatggtccctctgtagttaatactgcttcggattgcttatcattcattccttctaataatgcttgcccgttattcacgctgttccatcctctctaaattttcatcggctaatattataccaaattaggatctcatttggtgctaaaatcgaacgtatgttaggaaaaataaagagactgcgatttcatccccagtccctcgtaatcttgtacgcttaatttataatttcgtgatcaagcttgttcgttccaaacttcagtatcgtcaacctgattctttaaggctgccaagttatcgccgccagttacccagacaaagcctagaattgcctgatcgtcatccccaacatcattaaagaacctaaattgccagttattctttagcaaccattgccgttgaattgctcgtgattgataattgcgaacgaccatcaataagccaatttgtaatggtgtaataacatgtaggggcattccaacagtgcttcttaattgttcttcatactggtcaacatttgctgtgacatcataaatattagcaatcgacgttaaccctggttcaatattctttacataaagagtaccagtagaagtaacataaaagttaaccgaaaataccccccgatattcaagagatgccgcaacactttttacaatccgttgcatctcttttaacatatcatcgtgaatatttgctggtgtcgcaacagaaatcaattggcgcttgtcattgtaatgaagctgagcaagtgggaaaatctctgtatcttttccatcagttgccgctgtcatagtatattcatttgtatgttcaatccacgattctagtaaatatgtacccgtatcaataaaatcagcggcgcgagtaatatcagattggcgctcaatcagcattgaattttccccaattcctcgttgaatgggttttaacaacgcaggatagccaatggaatcgattgattggtaaacatcatctaaactaaccaccgtcatatatggagcaatattaatatttacctgatctaagaaagcacgttccattaatcggtcttgaacaatctcaagagcattaatcccctgaggaatcactgcatattgactcaaaaagtgcatgacgcgagaatcgacattaggggtttgataaataattgcatcacatgcttcaccaaactgagttagttttgtccgatcgttcattgcccctacaatggtaaagtcagccattttagttactaatggctgagaacgatccacatacacaccaacgttaaagcctgccttcttcgctgttgcaataagtgctgccccattgcgattaattccaataattcctaaagtactacctgggtaaatagcatctctgcccattttatcacttcccttattagtcttttacgaattcaactttattatcactcaatgattgaattcgtgccaatgattcgacacgaattccacgttcttttagttcaccagctccaggttgaaaactcttttcaataactattcctgcacccgctacttgaacccctgcttgatcggcaatttctaataatccctctactgcttgaccattagccaagaaatcatcaatcattaaaatcttatcattagcatctacatactttttagaaattgaaatccgattggttgttttcttagtatacgaatatacatcagcagtatacatattttggttaagagtaagactcttatgcttacgagcgaaaataactgggagattcatttccaacccagtcattacagctggagcaattccggatgattcgactgtccaaatcttagtaatgccttcattagcgaaaagcttggcaaattcttgaccgatatgcaacattaattgaggatcaacttgatggtttaaaaaagcatctacttttaaaacattacccggtaaaacagtcccgtattccttaatcttttcttctaactctttcatttttgtccccctctacattactcattacttatcataattatataatttatacgccttaatcaccgaaattaatttttgtgcataatcaggatcagtcgcataacctgcttcttgcaatccccgagctgcttcttgataattagtcgcatggacaactcgatcataattttgctgattggtgtctgttccatttaacatcaagcgcgtatggtctttaatagaatcactccaactatcataaacgcggaatcgtcccttagtaacgatccacttaccattaatatattctttagttgtcattactcgtgaatttgctcccgttcccttaattccaaataaattatgatattgtgacgctaactgactcgttccccattgagattcaagaatcgcttgggcaatcgtaattgatgcatagatatgataggtattttgcattgcctgggcttcaggagcaacttgctgaataaataattgcttcgctcggcgatccttttcacgtgcctcttgttcaattcgttgctgattccagattcggtaaaaatggtgcccaacgtaaacacccaaaaagataacaataacagcaagaatgctaataatccaatttctacccgtatggcggtttttgtttctccgcttccgttttgccacaagcttagcctcctcttttctactagttattaattgtagcaaaatccatctcgtttgggttaatttatcgtaatatttttagaagaagttaaaaaagcacaactgaaaaattttttccagttgcgcttgctgctactagccttaagtattaatggaattgcattccaccatcaacaataattgtttgtccagtaacgtaatttgaatcaggaccagctaagaaacttaccacattagcaacatcctctggttcagaaagacgcttcattgcaatgttcttggcaaaggtttccattccccattcatcacttttaccagcattttgaccaacttgatgtgcaatatcatacatcatcggtgtcttaacgattcctggtgcaaaagcatttaccgtaatatcttcagttgccaaatcttgagctacgacctgcgtaatgcctcgaatagcaaattttgttccagaataaagtgcaagattaggattaccaacaacaccagcttgagatgtagcattgataattttaccaccatggccaagctccttaaatgccttgtgggcagcttgaattccccataaaaccccagcaacatttacaccatatactttttcaaattgttcaggtgtaattgaatcaattggggtagtaggacctaatccagcattattaacgattacattaagatctccaaaatgttcgactgtcttctcaacagctgcaaacacttcttctctatttgctacatcggctacaagtggtaatgcttccccaccattattagtcagttcatcaacaacttgttggagctttacctcgtttaatgctacaagagcaactgcaaagccatccttaaccaatctttctacaattgccttaccaattccttggcttgctccagttactaatgctacctttttagtcattagtaatccctcctttatattagttatcatttattataccgtatattaaattccgtttaaatataaaaaagacaccagcaaaatactgatgtctctggaagcgataatcgaaatattaacgcttactgaattgagcagccttacgagctttcttaagacctggcttacgacgttccttcatacgagggtcacgagttaagagaccagccttctttaaagcgtcacggaagtctggatcaacagcgagaagtgcacgggcgataccgtgacgtactgcacctgcttgaccagagaatccaccaccattaacgttagctaaaacgtcgtattgaccttctgttttagtaacagcaaatggttggttaacgatagcacgtaagttggcaaatggaatgtagtcttcaattgccttgccgttcatcgtaatcttacctgaacctggtactaagcgaacacgtgcggttgcatccttacgccgaccagtaccactgtattgtacttgttgagccaattccattccctccttagattaagttagtaatgtctaaaacttctgggttttgtgcagcatgtttgtggtcttcaccagcataaacatgtaacttcaaaccttgcttgtgaccaagagagttgtgtggaagcatacccttgatagcagtttccaataacttctctggttcctttgcaaggaagtcaccagcagtccgttgcttcaaaccaccagggtagtttgaatgacggtagtacatcttttgagatgctttcttaccagttaacttaacttgcgcagcgttgataacgataacgtaatcaccagtatcaacgtgtggagtaaatgttggtttgttcttaccgcgcaaaattgatgctactgcagatgctaaacgacccattgggacattcttagcatcgacaacgtaccatttgcgttcaacttcaccaggttttgcgatgtatgtcgttctcacgattaagtcctccaattttgtttttctttacatataatagtgtaccgagttattagatggaaaagaaataccaatggctagtataccttcttctagtactttcgtcaatccttttcatcatttgttccataatctacattaactaaatataaaccacttgctggagccgtcatccgtgccaatgtccgatcctttgcctcaaggactctagacacgtcatctactggccgctgattgctcccgatttctaaaagaaaagccaccattattcggacttggttatagagaaaaccattaccagtaaaatcaaagacgacttcatttcttaattcatctcgtttaatcgtgatactctcaatcgtccgaacattgctttttgcttgactccccgacgcaacaaaacttgtaaagtcatgagttccaactaaatcattagctgcttttctcatcttttctaagttaagaggatatttaaaatgagaagtatagttgcgtttaaatgggttcacaaattccccctgatcaacccggtaacgataagtcttacgatgagcactgtatcgcgcatggaaatcattatccactaattcggccttcttaattaaaatatccagtggcaaaatactattgagggcttttctcatagattcattacttaaatgatagggaatatcaaagtgcgcaacctgattaagagcatgcacccctgcgtctgttcttcctgagccgataacaggaatagcaggatttgggtgcttagcaattttatttactgcattctttaatgtttgttctactgtccgcttatttggttgaatttgaaaaccggaaaaattggttccatcataagcaaaggttattttataacgatacattgtttacttccttattaatttagaaaaatattcgaatacaaactagaccaactgtcacaatcaatagcgccaagccagcccaagcatcatttttatgccaaactaattgacgataatgagtccgtggtgcattaggatcataccctcgtgcttccattgccgttgctaattcttcagcacgcttaaacgagttgacaaacaatgggataagaatcggaactaaatgtttaatccgtgtcaaaagatttccagcgttaaaattaatcccgcgggcccgctgagctttcataattttattagtttcatccataatagttggaacaaagcgtaatgcaatggaaagcattaacgtaatctggttgacaggaactttaatcacttgtaatggtttcattaaccatgccaaggcatctgcaatttgaaaagtttgcgtagtggcagttaagacagttgaggcagtaataatcaaaataaaccgataaaaaataattaatgaattaataaggccgtcacgggttattgccataattccccaatgccaatacgtctttccgccactactaaataaaatttgaaacgctactgttatcaaaataattaaaaataacggcttaatcccttgccaatattgtcttaaaccaacattacttaacttaattgccgcaaggagcgctaataaaagccatatagcagctaaaaaattattcacgaagaaaattaaaataacgtaaataatacacatgattagttttattcgtggatcaagacgatggaggatcgattttactggtacataactaccaaatacgattttactattcattttctttttctcctcatcgcttctgctatttcatctgctaacacatcaagcgtaagcggttctgtattttttaaggttatcccatctttactaaggaattgcgcaacctcgacggaaacaggcaaagtcaatgatagtttttttaatcgttgagcatccctaaataattgctgaggagtagtatccgcaacaatctgcccattgctcattgcaattacgtggttagcataataggccacctgctccatttggtgagtaaccattataatcgttgttcccttctcgttaagatctttaataagtttaagtaaatcattagttgcttgagtatccagtcctgctgttggttcatcaagaattaaaatttggggatccattgctaaaacgccagcaatcgctactcgcctcatttgtcctccagaaagtgcgaaaggggagtgtgactttaattctaagggcaaatccaccatttttaatgcttcatcaactgctttttcaattttttttgcaggccaccctaaattatgaggcccaaaagcaatatcctccgcaactgtttctgcaaatagttgctgttcaggaaattggaatacaaaaccgacttgatggtggattttacttaaatattcagtttttgtcgttgcattaatttctaaacctgctacattaagttccccactactgggctttattaatccatcaattaatgaaaccaatgtcgactttccacttccggtttgtccaataatagcaacaaattcttgctctttaattgttaatgagacattatgtaaggcttcattagtagaattaggatatgtatagtggagtttttttactgtaattgctgctttagccaattttttagctcctctaaatttaaatatctatttggaacattaattcctcgttcaaccaataatttctgcagttgctggcttgcgggaattcctactccaatttcaagtaataattctttatctttaaggatttccgatggagcaccttgttttacaacttgcgaatcatttaatacaactattttgtctgctaattcaatttctttaagatcatgtgtaattgaaataattgaaagattatattctttttttaatttttgtaataaagctaaaatttcttgtcgtgctaaaggatcaagcatactagtggcctcatcaaggattattatcttaggcattaatgcaaggattcctgcaagtgctacccgttgcttttgtcctcctgagagattaataggagctgtgtttttataatcactcattcctaccatctttaaggctttatcaatcttttcctccattttatttcgatctacttgtcggttttcaagtccgaatgcaacatcgtcagcaacggttgctcctacaaactgattttcagggttttgaaaaacgaatccaatatgctggtgaatcttgcctaaagaactttcgttaacttgtatttcgtcaacttcaatcgatcctgcagtaggactaagcaatccatcaattaatcgggctaatgtactctttccactaccattatgaccaataatcgctgtccaagaaactggttcaaaatccagattgatattttttaaaacggggtatttactgtctggatatgtaaatacaagttttcgaatctttattccagtcacagtatttcctcttttcaatattagttaataagtatattttagcaaagtccacagaattatctatcaaaattaaatttaaaataaaaaatcacttaccattgaagtgcacgagggtttcccgcattcaagctagactagggtttccccaccatcgtaacgctctatactatcaatgatagtgattctttattacgtatttaatttatgtgaacaaatcaattagtccactaattcaagaataaccattggtgcaccgtcaccacgacgaggcatagtcttcaagatgcgtgtgtaaccaccgttacgatctgcatactttggagcaagttcttcaaaaaggttttgaagagcagattgtacacgaatatcatcgccatcttccttaacatcagcaacaacattacgtacaaaagcggcagccttacgacgagaagctaaatcaccatgcttagcaagtgtaatcatcttatcagcggtcttacgaacttccttagcacgtgcttcagtagtggtaatacgaccattaacgattaaatctgtggttaaatcacgtaataaagccttacgttgtgaacttgtacgtcctaatttacggtaactcataaagtggttccctcctttgcaattggtatactaattagtcgtcttggcgaaatgaaacaccaagatcatttaatttaagtttaatttcttctaacgacttttgtcctaagttccgaaccttcatcatatcagacactgttctatcagttaattccttaacagtattgataccagctcgcttcaaacaattgtaagaacgtacagagagatcaagctcttcaatagtcatttcaagcatcttctctttgtgtgtttcttctttttcaaccatcacttgagcattttgagccgtttctgttaaatcaacaaacatagctaagtgttcagtcaaaatcttcgcacctagactaactgcttcagttggtgttaatgaaccatcagtccaaacatccagcgtcaacttatcataatcgttacgttgaccaacccgtgcattttcaacagtgtaatttacacgttcaattggggtatagatggaatcaatcggtaaaacaccaattgctaaatcatccatccgggccttattatcgttagcagaaaggtaaccgcgacccttatcagcagttaacttgatgtgtaattctgcgccatcagcaacagttgcaatatgcagatcaggatttaagattgtaacttcattatcaccctggatatcacttgcagttacttcagcaggtcctttaacatctaattcaagattcttttgatcctcagaatcaagcttcaaagaaactttcttaagatttaggataatctgcgtaacatcctcagttacaccttcaacagtgctaaattcatgtaaaacaccatcaatttgcatactcgtaatcgctgcacctggtaaagatgcaattaatacacgccttaacgagttaccgagagtggttccataaccgcgctcaagtggttctacgacaaacttaccgtagttatctgtttcttcaactttgtgaatatttggcttttcaaattcgatcattctatccttgtacccctttcaaaacgtggttcgtatttgagacaaaaaggcaattgatggaaataattgtctccagcaatgtcaattaaacacgacgacgctttggaggacgagaaccattgtgaggaacaggtgttacatcacgaatagcagtaacttccaatccagttgcttgaagtgcacggatagcagcttcacgacctgaacctggacccttaacttcaacttcaacagtcttcataccatgttccatagcttgcttagcagcagcttctgatgccatttgagcagcaaatggagtggacttccgacttcccttaaagcctaaaacaccagctgaagaccatgctacagcgttaccttgaacgtcagtaatcatgatcaatgtgttgttaaatgttgagtgaatgtgcgcaacaccagtttcaacattcttttttgcacgacgcttacgcgtaccttttttggttgccatatctagtactaacctccttttttataaagttaaactacttcttcttattagcgatagctacagccttacccttacgagtacgagcattgttcttagtgtgttgaccacgaacaggtaggccacgacggtgacgcataccacggtatgatccaatttcttgaagacgcttgatattcattgaaacttcacgccgtaaatcaccttcaacttgaatttgatctacttgtgcacgaatcttttcttcttgatctggagttaaatcacgaacacggatgtcttctgatacaccagcattttcaagaatcttcttagcagtagaatcaccaataccaaaaatatatgttaagccgactacgattcgcttgtcacgaggtaaatcgacacctgcaatacgagccatgagctacacctccatttctctataaaataaattacttaccttgacgttgcttatgctttgggttagcagagcaaataaccataacacgaccgttacgcttaacgatcttgcagtgctcacacatctttttaacagatggtcttactttcattctaaaatcctcctattgagagtaattgatcaataactacttgaaccggaaagtaatccgaccctttgtaaggtcatatggagacatttctactttaacacgatcccccggtaaaattttaatgtagtgcatccgaattttaccagaaacatgtgctaaaatttctgctccgttttccaattcaactttaaacattgcattaggcaaagtttcagttactttaccttctacttcaattacatcggcttttgccacgaaatagtacctccttgcctattctagatattacgtaaaaatggtggaaagtataaaacttcccactactcagatagataaaccttgcatagtttagcatatgtttacaaacttcgcaagagataactattatctagtttaggtttgttaatactttcttgatatcttcgtaaactttatcgatatcttgttcaccattaatttcgtgcaaaacacctttcttttggtaatagtctaccagtggtgtgttcaacttaatattaacatctagacgattcttaaccgtttcaggcttatcatcatcacgctgataaaattcatgatgaccacaaacgtcacatgtgccttcaactttaggaacattgtaaagcttatgatacgttgttccacagttacggcaaataaaacgtccacttaaacgttctaccaatacatccggttcgacgtgaatattgatcacagcatcaagatgccgattactctctgctaacatcttatccaaagctgctgcttggttaagattacgaggaaatccatccagcataaagccatctttagtatcatcttgagctaaccgttccttaacgataccgttagtaacttcgtccggaacaagttcacctttatcaatatatttcttagcttcaattcccatgggagtttcattttttatggctgcccgaaaaatatctccagttgagatatgaggaattggaaaatcttcaacgatcttttgagcttgagtacctttaccggcacctggaagacccattaatacaagattcatactcattagtcatttcctcctttaggttctcgaataaatccaatatattcgcgcttcattgttagtccgtttaactgccgaacaacatctaaagcaatttgtacgataatcagtaagcttgtaccacctaaaccaattgactgacttaggttccatacgttacttgcaattaacggaattaaggagatcaatcctaagaataatgaacctactgtactcaatcgcattaacaatgaagaaatatagtcttgtgtaccctttccaggacgcactccagaaatataacttccttgcttttgcaaattctcagcaagtttttctgggttaacctgaacaaaggcatagaaaaaggtaaatacaacaatcaaaaatacatacagtgcgatcccaggaccagattgcatgttaaaaatggtcgtcatgatttgataccaactatccccaccatggttttgctggaaagccataagaatagtttgcggggttgagataaaagaaccagcaaaaataacaggaataacacctgatacgttaatcttcaagggaagataactactggatggtgaagtagtggttcgtcttgtgtattgaattggtagacgtctttctgcctgttgtacccatgtcacaaacgctacaataattaaaattgcaacaataacaagagtaacaaatccaattcccatccacaaagcagaaccagattcaccagcaatttggtcatcccataactgacgaattccacctggcatttgcgcaacaataccagcaaaaattaacatggaaacaccattacccaagccacgttcagtaatcatgtctcccatccaagtagcaaacattgtacctgcagttaaaattaaaccgattgttaaatacgtttgaacaccaggatgattaaccaaacgaatagtactcaatgcattaaacccggcggtaataccgattgattggataaatccaagtacaatcgttaaccatcgggttgcttgattaagttttcgccgtcctacttctccttgtttactccattcaacaaaacgcggaacaatatccatttgtaatagttgaacaacaatttgcgcagtaatatatggagaaactcccattgcaaataaagagtaattctccaatccaccaccactaaaggtattgaggattgatgctaaaccggttgaggagatttcctgcaaagcagcagcgttaactccaggaacggtaatcgctgccccaatccgatagacaatcaatacaaacaatgtaaagaaaatctttttacggatatcttttaccttgaatgtatttttgacggctgtgaacaaactacatcacctcagttttaccaccagcagcttcaattgcagaaactgcagaagcagaaaacttattagccttaacagttaatttcttttcaagcttaccgttaccaagaatcttgatgccgctcttcaagttcttaactaagccactttccatcaataattgtggagtaacttctgtaccatcatcaaacttgtttaatgatgccaagttaacaattgcgtattctttccggttaatgttggtaaatccgcgctttggaatttgccggtaaagtggcatttgacccccttcaaatcctaaacgggtctttccatgagccttttgccctttagtaccacgtccagatgtaaaaccgtgtcctgatgaaagtccacgacccttacgaagacgcttagaacgagaaccagcagctggcttcaattcgtttaacttcattagtaggcacctccttattatttaattttaattacttaacttcttcaacagaaaccaagtgagcgatcttaaaaatttgaccgcgtgttgccgcattatctggtaagataactgagctattgatcttacctaatcccaatgccttaacagtacgacgttgagtaggttgtcggtgggcaacactgtgaattaaggtaacttttacttgagccataatttagtgccctccttattctgctaagtggtctactgaaacaccacgtaactttgcaacttcttcagcgttctttaattgcttcaaaccttcaaatgttgcacgaacaacattaacaggtgtgttagagccaaggcgtttagaagtaacgtccgcaacaccggcaaggtccataacattacgaaccgcaccaccggcagcaactccagaaccttcaacagctggctttaacatgatctttccaccgccgtatacaccaataacttcgtgtggaatagtagttccaacgataggaacagtaatcaagttcttttcagcagctgcttgagctttacgaatagcttctggaacttcttgagccttaccagtaccaaaaccaacatgacctttacggtcaccaacaattactaaagcagcgaaacgcatacgacgcccaccttttacaaccttagtaatccggttgatggctacaacttgatcgtctaaatccaactttgttggatcaatgaattctgatgatgccattgcaggttattcctcctttttttagaatttaagtccgttttcacgagcagcttcagccaaggcttgaacacgtccatggtaaaggtatccaccacgatcaaacacaacttcagtaatgttcttttcgttagcgcgtttagcaattaatgctcctacaccactagcttgttcagtcttagtctttccacttacttcactatcatttgtggaggcacttgcgagcgtcacaccctttacgtcatcaattaattgagcgtaaatgtttttgtttgaacggtaaacacttaagcgtgggcgctccgcagtaccagaaatcttaccgcgaacgcgtaaatgacgacgttgacggatcttgttcttgtctggtttagaaatcacaacagtcacctcttattatattaattatattaaataaaagaatgttaaataatcttctcagattacttaccagtcttaccttccttacggataatgtgttcgttttcgtaacgaatacccttacctttgtatggttcaggtgaacgtacagcacgaacttcagcagcaaaattaccaaggtgttccttgttaattgagcttaattcgatagtagtattgtcaggtacgttaatttcaacatcttctggcttatccatttcaactgggtttgagtaaccaacagttaaaatcaacttgttacctttgagttgagcacggtaaccaacaccaacaagcttaagaaccttcttgtaaccattaacaacaccttcaaccatgttgttaacattagcacgagtagttccgtgtaacatctttaacttattagtatcagcatcacgatcaaactttacaacgttaccatcaatagtcattttgattaatggtgaaatttcacgagataaagtacctttaggacctttaacagtaactacattaccatcttgagaaatttcaacaccacttggcaaatcaatttctttgtaaccaatacgactcatctttgcacctcctatctaatattcgttttttaccaaacgtaagcgataacttcgccaccaattttcttggcacgagcaactttatcagtaacaacaccttcagatgttgaaatgatagcaatacctaatccattaagaaccttaggcacagcatctgacttaacgtatgtacgtaaaccaggcttagaaatgcgctttaagccagaaataacacgttgaccgtcattaccgtactttaagaacacacggatgatgccttgcttgttatcatcaacgtattcaacatcgcgaatgaaaccttcgttttttaagatttcagcgatgtccttcttcatctttgatgcaggtgcttctactgattcgtgttgagccatgttagcattacgaatacgagttaagaaatctgcaattggatcactcatagacatcgatgttttcctccttttgtcggtttttttgtttaccagctagccttcttcaaaccaggaatttgtcctttgtgggcaagttctcgtaagcaaatccggcataggtggaatttacggtaaacagagtgcggacgtccacaacgtgcacaacgcgtgtattcacgacttgagaacttagctggacggttgcacttagcaatcattgattttttagccaatttgtggaacctcctttatttagcaaacggcataccgagttgagcaagtaattcgcgggattcttcgtcagtttgtgcagttgttacaataacaacatctaaaccacgaactcggttaactttatcataatcaatttctgggaaaattaattgttcatggataccaagagtgtaattaccacgaccatcaaatgccttgttacttacaccatggaaatcacgaactcgtggcaatgccacattaactaatttatctaagaaatcatacatacgttcaccacgcaaggttaccttagcaccaattgacataccttcacgaagacggaaaccagcaattgatttcttagccttagtaattaaaggcttttgaccagaaatcaagccaagttcttcaacagcttcatcaagattcttggagttagtagttgcatcaccaacacccatgtttaaaacgattttgtcaatctttggtgcttgcataactgaagagtagttaaacttttcaattaatgctggacgaatttcattttcgtatttagctttcaaacggttttccattagaagttattcctcccttccttaaaaattagtcaagtgtcttacctgacttcttcgcaacacgaaccttcttaccatcaacgaacttgtaacctacacgagttggttcatttgttgaaggatcaatcagcattacgtttgaagcattaattgcagcttctgtatcaataacgccaccattagggtttgagttgcttggtttttggtgtttcttaacgatatttacaccttcaacgataacgcggttttgagaagcaagtacctttttaatagtaccttctttgcctttatccttaccagcgattacgcgaaccttatcacctgttttaatgaacatgttgattgtgcacctccttattttcggtaaaatctttagagaacttctggagctaatgaaacgatcttcatgaagtcgtctccacgaagctcacgagcgattgggccaaaaatacgggtacccttagggctcttgtcgttgttaattaaaacagcggcattttcatcaaacttaatgtatgaaccatccttacggtgaataccatgtttagtccgtacaacaacggccttaacaacgtcaccctttttgacaacgccacctggtgttgcctgctttacagtagcaacaatgatgtcaccaatattacctgttttaactcgggaaccacctaaaatcttaataactaagatttcacgagcaccggagttatcagcgaccttcaaccgactttcttgttgaatcacggttaatgtcctccttccatttacaaataagaattagaatacgaataatttttagagttatctgctaaattaaagggtagcagctttttcgacaatctttacaagacggaaacgcttcttagctgataatggccgagtttccataatttgtacagtgtcgccggtcttagcttcgttgttttcatcgtgagcatagtacttctttgagtacttaacacgcttaccatagataggcgcactcttgtaagtatcaattacaacagtgatagtcttatccattttatcagaaacaacgtggccttggtaaaccttacgtgcattacgttcttcactcatgcgctaatcctccttttcgtattcttatttgtttaattcttgttgacgaagaactgtcttaacccgtgcaatatctttgcgtacttgcttaagacttgcagtattttccaactggccggttgctaattggaaacgtaagttaaacaattgttccttcagttccttttcacggtcaagtagcttatcagtggttaatccattcagttcttgtacataatctttacttttcattagattgtccacctacttcctcacgttgtacgatcttagtgcgaactggcaacttgtgaccggcaagacgtaaagcttcacgagcgacttcttcagaaacgccccctacttcaaacattaccttgccacgttttactggagcaacccatccttcaggagcacctttaccgttacccatccggaccccaacacctttactagtgtatgagagttgtgggaagattttaatccaaactttcccaccacgcttcatgtaacgcgtcatagcgatacgagcagcttcaatttgacggttgctaatccaatgtgaatcaagagcttgtaaaccaaattcaccaaaagtaacagttttaccacccttagcttcaccgcgcatatgaccacgttgaaccttacggtgctttacacgttttggtactaacatgtgttacttccctccttgttcatcattgtttgagttcttcttagtaggaagtacttcaccacggtaaatccaagtctttacaccaagaacaccgtatgtagtgttagcttcgtcccaagaataatcgatatcagcacggagtgtatgcaatggaacagtaccatctgagtatgattcgatccgtgacatatctgcaccgttcaaacgaccagcaacttgagtcttaatacccttagccccagcacgcatagcacgttgcatagccccacgcatagcacgacggaaagcaatacgagcttctaattgccgtgcaatactctcaccaacaaggtgagcatctaaatctggcttcttgatttccacaatgttaatgtgaacacgtttaccagttaatttgttaagttctttacgaagtgcttcaacttctgaaccacctttaccaataaccattcctggcttggcagtatgaattgatacgtttacgcggttagctgcacgttcaatttcaacggttgatacagaggcatcagcaagtcgcttttcaatatacttacggattcgaaggtcttcgttaaggtaatcagcaaagtccttgtcagcgtaccactttgcagtccaatcacgaatgaccccaacacgaaaaccattaggattgatcttttgacccactattcattcctcctatcgttctgtaacaaccactgtaatatgactagtccgcttgttaattggagaagcagaaccctttgcacgaggacggaaccgtttaagagttggtccttcgttagcaaaggcttcacttacaaccaatgaagcacgatctaagtcgaaattgttttcagcgtttgcaacagcagattttaatactttttcaacatctgaagcggcaccacgaggggtgaacttcaaaatagcaaatgcttcggcaacactcttgccacgaatggcatctaatacaagacgaaccttacgagcagaaacccgtaccatcttggcagtagccttagctgacgtaatgttttcagccatatgttatttcaccctccttacttacctgtcttcttgtcatcagaagcatgaccatggaaagtccgagtaggaacaaattcacctaacttgtgaccaaccatgtcttcttgtacgtaaactggcacgtgcttccgaccatcatatactgcaaatgtgtaaccaataaaacttgggaaaatggtagaacgacgtgaccatgtcttgatgacagtcttcttttcagaaccttcttgctccttaaccttcttcagtaatgaagcatcagcgaaaggtccttttttcaaactacgacccatttagtgtacctcctctcgggtattagaacgtatataaatattaacgagtatgtggaccgcgcttccgaccacgaacaatgaacttgtttgaacgagctttgtgtgaacgggtcttcttaccaacagtcttcttaccccatggagaaagaggagatggtaaaccaactggttgcttaccttcaccaccaccatgtgggtgatcgttagggttcataacagaaccacgaacgtgtggacgttgaccagcataacgagtacgaccagccttacctttaataatcaaggcgtgttcatcattaccaacagtaccgatagtagcacggcaagtagcaaggaccatacgaacttcaccagaagaaagacgtactaatacgtatttttcttccttaccaagtaattgagctgaggcaccagctgaacgagcaagttgaccacctttacctggttttaattcaatattgtgaataacagtaccaactggaatgttctttaaaggaagagcattaccaaccttgatatcagcatcaggaccagattgaacggtcatgccaaccttcaagcccttaggtgcaatgatgtatgatttagtaccatcagcgtaaacaagtaaagcaatatttgcagtacgatttggatcgtattcaattgccttaacagttgctggaacatcatctttaattcgcttaaagtcaataatacggtattgacgctttgtaccaccaccacggtgacgaacagtaatatgaccatagctgttacgaccagcagtgtgctttaacggagccaataatgacttttcaggtgttgtcttcgtgatttcagcgaagtcgtaaccgttcatattacggcgaccgttagtggttgctttatatttacgaattcccactgttttttcctcctttttttaatgattagttttcgttgttgtcgttaaacaacttaatttcatttgagtcggcagataaagtaacaatagccttacgacgacgcttagtgtatccttcgtaacgaccttggcgctttaacttaccttttacattcataatgttaacttttacaactttaacgccaaaaatttcttcaacagcatttttaacttgtgtcttagttgctcgtaaatcaacatcaaaagtgtaacgcttgttgtccataccagccattgaagcttcagtaactactggacgtaaaataatgtcgcgtgcttccattatgcgagcacctcctctacttgagaaagagctgacttagtgataacaatcttttggttatcaacaacgttcaagatgttaacacctgctggagtaacaactgtagcattagctaagttacgtgctgataaagcagcattcttgtcgtcatcagtaacaacaactaatgtcttttcagcaacgtttaagttacccataacatcagcgaattcctttgtctttggtgcatcaaagtttaatgcatcaactactacaaagctgttatcaagaaccttttgggaaagggcagacttgattgcaagttgacgaaccttacgaggaaggctgtacttatatgaacgtggagtaggtccaaaaacaataccaccaccacggaattgtggagaacggatagaaccttgacgagcacgaccagtacccttttgacgccatggcttcttaccaccaccgctaactgcagaacgattctttacagcatgtgtaccttgacgtaatgaagcacgttgacgcaaaattgcatcaaatacaacattttcatttggttcaacaccaaatactgcatcgtttaattcaacagtaccgttttggctaccatcttgtttatataaattaacgctagtcattatttacttcctcctttcttcttatttattgtgttgtttgctaagactcttcttagtattagccttaactgagttcttaatagttacgtaagacttgtttgcaccaggaacattacccttgatgagtaatacgttgttgtcaagatcaaccttaacaacttgtaagtgttgcatggtaacagtcttgccacccatacgaccagggagcttcatacctttgaaaacccggttgataatggcacccaatgaaccaggacgacggtggtaacgagaaccgtgtgccataggtccacgagattggttatccttatggatgttaccttggtaaccatgacccttggtagtacccgtaacgtcgacagtttcaccttctgcgaaaacgtcagccttaacttcgtctccgactttaatgtcccctaattcagcgtcgcggatttcaccgatgaagcgcttaggggtcgtgtttgcttttgctgcatgaccttgttcaggcttgttgctcaaaacttcccgcttgtcatcaaaaccaagttgtacagcactgtaaccatcgttttcaacggtcttaatttgcattacaacgtttggtgtaacatcgataacagtaactggaactaattcaccattgtcagtgaatacttgagtcattccaacctttttacctaagattcctttggtcatgagtacacctccaattttatgttttatgtattattcttattctaataattaaagcttaatttcaatatcaacaccactaggaagatcgagcttcattaatgaatcaacggtcttaggtgttgggtcaacaatatcgattaaacgcttgtgtgtgcgcatttcgaactgctcccgtgacttcttaaatttgtgtggtgaacggataacagtatagatagtccgttcagttggtaatggaataggacctgaaatttgagcacctgtccgcttagcggtttcaacaatcttatcagcagattgatctaaaatacggtgttcataagcctttaaccgaatacgaatcttttgttttgccattatgttccctccttcgtcagatttgaaatttgactagctccgcggaaattaccgccacatcctgtggcaaagcggccgggtgtgtcgcaaccttccgcatcaacgcttcgcagctttcacttaatagggggtaaggcaaatctacctccaaagctcaagcacttatccataatactaaagaaacgtaattagatcaagggaaattttcgaatattttcaattgaaatatttttgtaaaattttcttcctaagttagttaaaaattagcgatactaaaataccattaatttttctgatgtattaaaaagtaatttatttgttttgacgaaattcattaaaatgctttttgaatttttatcatcaaacaaaaaagaactacagtaatcaaactgtagctctttgatggacttgagatcacaatgtcaataattagttattgccaccgtttttcttaataatatcttcttgaacagacttaggaacagctgagtagtgatcgaaagtcatagtgaaggtaccacgaccttgtgttgctgaacgcaatgcagtagcgtatccaaacatttcagaaagtggaacaaatgagtggattaattgagcattaccacgttcttccataccatcaatggtaccacgacgagctgttacttgacccataacatcacccatgttgtcttgtggtacaacaatgtcaaccttcataattggttcaaggataacaggatctgctttcttagcagcattcttaagtgctaatgatgcagcaaccttaaaggcggcttcactagagtcgacttcgtggtaactaccatcataaagtttagcatgcatgtcaacaagtgggtaacctgcaagaacaccattttgcatagcttcctttaatccttgttcaacagcagggataaattcacgaggaacaacaccaccaacgatggcatcttcaaattcgaatccttccccttctttaagtggtgtaaattcgatccatacatcaccgtattgacctttaccaccagattgacgaacaaacttaccttgagcacttgcagtcttagtaaatgcttcacggtatgaaacttgtggcttaccaacagtaacttcagcgtggaattcccgacgaagacgttcaacaataatgtccaagtgaagctcacccataccagcaattaaagtttcaccagtttcaggattagtttcagccttgaatgttgggtcttcttcagcaagcttttgaagacccttgtccatcttatcttggtccgccttagacttaggttctacagaaacttggataacaggttctgggaagtccattgattcaagttgaagtggatggtcaggatcagttaatgaatcaccagtagtagtgttcttcaaaccaatagcagcagcaatatcaccagagaatacttctggaatttcttgttgttggttagagtgcatttgaagcaaacgaccgatacgttcacgcttgtccttagtagcattaagaacgtatgaacctgattgaagtgaaccagtgtaaacacgtaagaatgtcaaacgaccaacgaatgggtcagtagcaatcttaaatgctaaggcagcaaatggcttatcatcaccagctgttaattcaatttcatttccatcagcatcatgagcaacgaatggcttaacatcaagtggtgatggaagataatcaataacagcatcaagcatcatttgaatacctttatccttgtaagctgaaccagctaatacagggaaaatttgttcttccaaagtacctttacgaatagctgctttgatttcatcaacagaaatttcttcaccttcaaggtacttttccattaagttatcgtcaatatcagctaatgtttcaaccatttcgtcatgacgcttttgagcttcttccttcatatcatcaggaatctcaacagtatcccagttagtaccgagcttatcttcgtcataaacataggcaaccatcttaacaaggtcaactaaaccgataaagtcatcttcagcaccaattggcatttgaataggaagaggagtaacattcaaacggtctttaatagtttgaactgagtaatcaaagttagccccaatcttatccatcttgttcgcaaaaacgatccgtggaacgttaaattggtcagcttgacgccaaacagtttctgtttgtggttcaacaccagcttgagcatcaagaactgttacagcaccatcaagaacacgtaatgcacgttcaacttcgacagtaaagtccacgtgtcctggagtatcaatgatgttgatccggttatctttccaaacagcagtagtagctgctgacgtgatagtaataccacgttccttttcttcatccatccagtccatttgtgaagcaccatcatgggtttcaccaattttgtgaatcttaccagtgtaatatagaatccgctcagttgcagtcgtcttaccggcatcaatatgtgccatgataccgatgttacgagtcttagcaagtgggtattcacgtttattagccatcttaaaagagtatctccttccgaaatatggttatccttattttaccattattttcaaaaaggggtgacgtaatcgatgtttgaacgtcacccccttcactgaaactagttaaataaccagaatcaaatgacagtgattattaccagcggtagtgtgcgaatgcacggttggcttctgccatacggtgcgtatcttcacgctttttaactgaagctccagtattgtttgaagcatcgatgatttcacgtgcaagacgttcaaccattgtatgttcaccgcgcaaacgtgcgtattgaacaatccaacgaagacctaatgtagtacgacggtctggacgaacttcaatcggaacttggtagttagaaccaccaacacgacgagccttaacttccaagacaggcataacattttccattgcttgttggaatacttcaactggatcattaccagtttcgttcttaatttcatcaaaagcagcgtataaaatcttagtagcagttccacgcttaccatcaatcattaagtgatcaattaagctagtaaccaactttgagttgtacattggatctggtaaaatttcacgcttttgtacatgtcctttacgtggcattacttaactcctccttaaaattacttcttatccttaggcttcttagcaccgtacttagaacgtgattgcatacggccttcaacaccagcagtatctagagtaccacggatgatgtggtaacgaaccccaggtaaatccttaacacgaccaccacgaattaaaacaactgagtgttcttggaggttgtgtccaataccaggaatgtaagcagtaacttcgattaagtttgaaagacgtacacgggcgtacttccgtaaagctgagttaggcttcttaggagtcatagtacccacacgagtagcaactccacgcttttgtggtgatggagtcttaatttcttctttcttgaaagtgttgtaaacataaccaagagctggtgactttgacttgcccttgtggctcttacggcctttacgtaccaattggttaatggttggcattattttttccccttccttaatttaagtccacacatccaggcggttcttttttatggataaaaaaagtcctgtatgtatttatacaatttttgtgccttcgttgacgcatctgcccaacgacagacactccgttgctaaaaaagcaccttaaatagactatcatgctcacaaatgaatgtcaacgtatccttatcgatttcttttaaatcgttaatttaaaagtgaatttcattaaaaattacgtatttatttattgggaggtttttcatgttagttttattatttttatttggtgcttctgtcgcttcatttattacttcttgttgctatcgtctaggcaataattgctctttaatcattcctcagcggtcatattgtgacaattgccattctattttgcgatggtggcatctcatccctatttttagttttatcatccttcgcggtcaatgcttttattgtaaacaaaaaattagtttatatctgcctgtaattgaattcttatccgggattgcttttatcactttcatcagctatgaacctattcatgacttaatcattcttctctttctcactagcttaatcttcttaacttctactgatttttttagtcatgtaatctattcctattcactattgggactatttcctatttccttattatccattccacaaaattatttttacaatttgatttttgcctgtattctagcagtcagtttactattgttcactatttttactaagacactaggaattggtgatattgaatttttatttgtaatatgtctgatatggggatggtaccaaacactcataattatccaatggagttctttaatcatgctattcatctttttgtttacaagaaaaaagaaactaccatttatccccgcactagctttcactactattctgtgtcttcttatacaaggctgttaaaaaataaaagaccaggataccctagtcttttacaatatttaattagtatcatcttttactggtttgagttttactacaaataagttttgcccaaattgagcgaggttttcaatattttgtagtaataagagcaaccaagaaaaagctaagccaaattcaaataattcgaatgcagttaaagaaagataatcagttaacttaaaaacaatatattcgatactcattgcggctccaatcgtataagaaatcaccaaaaattgtttagtgacttcgggtagaacccacctaataactacaatcagaattagcataatataaacaagccacattgaaattctgtcatgtaaaacgtgaaattctggattattgggaaaaagaccaatagaagcaatacagatagctagcataattaacagccaccgcaatacttgaattttataaccatgataccgacgttgaatatttacaaacaagtaatcaactaaagcaatcattagtaatccagtaaaaatcaaagttatattaaattgcaaactggtggaattttttgccgttcctaaaaaactaaaattataacgccaccaatctcgtttagaattcgtcagcattgaaaaaagcattccaccaatgatcattattgttaataaattggtgataactcccgatgataatgttaaagccaagttaatcataatataatttattgccgcaataattacaaatacaaaagcagttgctgtataaatatcaaaccgtgcatccttaaacatctggccaaataaccaaaaaattgccgatagtgagaatgcaatgattagtccacatgcaatcgtaattgttggcaaactccgccaatgaaaatccttgctgggcccttttccgagaattttagtaataataaaagttatcaaaaacgataggattccactacatactcctaagattaatgcaccattagcaatggaataatcatcacctgttatcgggaccgtgttaatttttctggcgctaaaaaaagctaaaaatattgcagctaaaataattgaaggaatcacataccagaaaatgttaattttaggtagttgatcactcacatttattggacggatgttaatttgtttatgattaacactaagagagagctcttcgttcgtagagaagtctgtctttttaaatgctgagtcaggaatttctatctgatatttttttgccaagtaatcacctcattttaaactaaaaaggcaatggccccttcacaggttaaccattgccttttttataaattagttttgcttatcttcttcttttaacttagcctcaatatctttaattgagtaagcagctacactaacttcttttggcttgatgttccggtaagcactcataccagtacctgcaggaataatcttaccaataataacattttctttcaatccaaccaacggatcgttcttaccacgaatagcagcatcggttaatacacgtgtagtttcttggaatgaagcagcggacaagaaactgtttgtctctaaggcagccttagtaataccaagaataacaggacgagctgttgcaggaatatttccagcaactaaggtatccttgttagcgtcacggaattgactgatatccatcaattgacccggtagaaggtcggtatcacctggatccatgacacgaactttccgcatcatttgacgaatcataatttcaacgtgcttatctaacaagtcaataccctgcatccggtaaacaccttgaacttgcgataagaggtaagtttcagtagaaagaacatcacaaacctggattaattccttaggatcaatcgaaccttcatttagcggtgcccacggtgaatgaaatcaccttcagcaactttcatccgtgctgtaattggaagggtgtaagttcgggtatcagtctcacccttaatcgtaatatccttcgtccattcagcaggattttcttcgatagacacaacttcaccagtaacctctgtaattgttgcccgacctttaggattacgtgcttcaacaatttcttggatacgtggaagaccttgagtaatatcatcgttaccagcaaccccaccagtgtggaagttacgaagggttaactgagtacctggttcaccaattgattgagcggcaacagttccgacagcttcaccagcttctacacggtcaccagtagctgcatttcgtccataacaacgttcacatacaccatgttcagtgttacaagtaaatgctgaccgaatagttactttctttacgccggcatcaacaatcttttgagccatttcttcgtcgataaggacattcttaccaacaatcttttcaccagtcttaggatcaaagacagacttcatagtgtaacggcccatgattcgatcataaagtggttcaatcatttcgttaccgtttgtaatagcagtaacttcaagtccgcgatcagtaccacagtctttttcacgaacaaccacatcttgcgcaacatcaaccagacgacgagttaagtaacctgagttggcagtcttcaaggctgtatcagtcatacctttacgagcaccgtgtgatgaaataaacatttccaacactgaaagtccttcatagaagtttgacttaacaggtaattccataatcttaccgtttggtgatgccatcaatccacgcattccggctaactgagtaaagtttgaaatgttacccgcgcaccagagtcggacatcatgttaattgggttatggatatccatgtgttcaattaacttgttttgaacttcatccttagcatcgttccatgcaccgattactcgttcataacgttcatcgtctgtaattaaacctcgacggaattgcttagtaattaaagcaacttgcttttgtgccttatcaagaatttctggtttttctggtaaatcatgaatatcagacatagcagtcgttagaccagaaatagttgattcgtagtaacctaagtccttaatacgatccaagaattgagaagtcttcgtaactttgtaacgcttgtatacttcagcgatcaagtcagataagaagcccttcttaaatggtggaactaatggtgcattttcaaggtattcatgaatatcttgaccaggttcaaggaagaaacgatcatcaacaccattttgaatatttgcatctgttggttcgttaatgtaagcaaaatcttttggcataattcggttgaaaagaagcttaccaacagttgtcaccatgatcttgcctcgttgttcatcagtaaatggcttttcagggaatgcagatacttgaactccaacacgggtttgtaatgaaacatagtcattgcggtaagcaagttcagcttcatcagtatctttgaagatcattccttcaccttcacgacccttatcttcagtagtcatgtagtagttaccaataaccatatcctgtgatggtgaaacaataggttctccgtcacgaggactaagaatatggtgagcagcaagcattaacaaacgtgcctccgcttgagcttcatcagataatggaacgtgaatagccatctgatccccatcaaagtcagcgttatatgctgaacatactaatgggtgaagacgcattgacttaccagaaaccaagattggttcaaacgcttggatacctaaccggtgaagagtaggtgcccggtttaatagaactgggtgttccttaataacgtcttccaatacatcaaagacatcatcatcactgcgatcaatcttacgcttagcagctttaacgttagcggaaaggccacgttttaccaattcatgcataataaatggcttaaataattcaagtgccattggaactggtaatcccatttggttcaacttcaatgatggaccaacatcaataacggaacgaccagagtagtcaacacgcttaccaagtaagttttgacggaaacgtccttgcttacccttaagtaagtgagaaagtgacttcaatggacgattacctggtccagctactggacgtccacggcgaccattatcaattaatgcatcaacagcttcttgtagcatccgtttttcattttgaacaataattccaggtgcttgtaatttaagaagtcgctttaaccggttattacggttaataacccgccgatataaatcgttcaaatcggaggtagcaaaacgtcccccttcaagttgaaccattggccgcaagtcaggtggcataactggaattacatccataaccatccattcaggcttatttcctgacttaatgaaagcttcaagaatatcaagacgacgaatagcacgagtccgtttttgaccagtagcttctttcaattcttcttttaattcagcagcttccttttctaagtcaacatcggctaaaagtttttgaatagcagcagctcccatttcagctttgaaacggtcaccatattctgcttttttatcacgatattcagcttcagttaaaagttgtttcttttcaagtggagtatcacctgggtcaagaacaacatatgaagcaaagtaaataacttcttcaagtgaacgtgggctcatatctaatacaagtcccattcgacttggaattcctttaaagtaccaaatgtgagatacaggagcagctaattcaatgtgccccatccgttcacgacgaacttttgcactagtaacctcaacaccacaacggtcacaaacacgacctttgtaacggatacgcttgtactttccacacgcacattcgtaatccttggttgggccaaagattcgttcgtcaaacagaccttgcttttctggctttaatgtccggtagttaatagtctcgggctttttaacttcccatatgaccaactacggatcttatctggagatgccagaccgatctgcatactttcaaatttattgacatcaatcaaaggatgttcctccttctttcagtaaaccgtagcaacctaaatattaattttgattagttttgtcatcggtagttgttgaagttgcttcagacttgttttcttcttcgttcttcttatcgtctgttttatgttcttctgcatatttagctaatgcatcaacatttacaacttcatcatcatcttcgtccatgttctttaactgaatttccttgttgttaccatcaagaaccttcatatcaagacctaatgcttgtaattccttaacaagaacacggaatgattctggaacacctggcttaggaattggttgaccattgatgattgcatcataagtccgaacacgaccaacagtatcatctgacttgtaagtaaggatttcttgaagagtgtaagcagcaccataagcttcaagagcccaaacttccatttcaccgaaacgctgtccaccaaattgtgccttaccacctaatggctgttgagtaacaagtgagtaaggaccagttgaacgagcgtgaatcttatcatcagccatgtgagctaacttaaggtagtgcattgaaccaacagcaatccgattttcaaatggttcaccggtacgaccgtcataaagaattgtcttaccgtcttctgggaatccagattcacgaacagcatcccaaacatctttatcagatgcaccatcgaatactggagtagccatatgaattccaagacgacgagcagccattcctaggtgcaattcaagaagctgaccaatgttcatacgacttggcacacccattggactaagcataatatcaatcggagttccatctggcatgtatggcatatcttcttctggtacaacgatagaaacagtacccttgttaccatgacgtccagacatcttatccccaacctggatcttccgcttttgtgcaatgtaaacacgaaccattgtatttacacctggtgataattcatccccattttcacgagtaaagactttaacatcttggatgattccgccaccaccgtgaggaacacgtaatgaagtatcacgaacttcacgtgacttttcaccaaagatagcgtgaagaagacgttcttcggcagataattcagtcattccctttggagtaaccttacctactaaaatatctccatcatgaacttcggcaccgacacgaacaattccgttttcatcaagatctttcaaagcatcgtcaccaacgtttggaatttcccgcgtcatttcttcaggtccaagcttggtttcacgtgcttcagattcgtatgattcgatgtgaatagaagtataaacatcgtctttaactaatcgttcattaatggcgatggcatcttcgaagttatatccttgccaagtcatgaaggcaattaatgggttttgtccaagagctaattcaccttgttccattgatggaccatcagctaacacgtcatcagcatcaacatgttcgccaaccttaacaattgggcgttggttgtagttcttaccaccgtttgaacgacggaacttcattaacttgtaagtatcaagtgttccatcttcctcacgaacccgtacttcacgagcatctacatattcaaccgttcctggcttcttagcaatcatcgcaaccccagagtcatgggcagccttgtagtcaataccagtacttaccaatggagcatgaggattgatcaaaggaacagcctgtcgttgcatgttagcacccatcaatgcacggttggagtcatcgttttcaaggaatgggatacatgcagaggcaacagaaacaacttgcttaggagaaacatccatgtagtcaatgttttcaacactggtttcgatgtagtcatctttatcacgagccattacttgatcgtcaacaaatgaaccatcatcatttaatggcgtgttagcctgagcaatgatgaagttatcttcttcgtcagcagttaagtaatcaatcttatcagttaccttgtgatccttccaggaaacacgacggtatggagtttcgatgaatccatatttatttacccgtgcgtaagatgaaagactgttaataagaccaatgttaggaccttctggtgtttcaatagggcacatccggccatagtgagtatagtgaacgtcccgcacttcatatccagcccggtcacgagttaaaccaccaggaccaagagctgaaagacgacgcttatgagttaattcacctaatgggttagtttggtccatgaactgggaaagttgggatgaaccaaagaattctttaatagaagcaaccactggacgaatattgattaattgctgtggagtaacagtgtcaggatcttgaattgacatccgttcacgaacaactcgttccatccgtgcaagaccaatccggaattggttttgaagtaattcaccaactgaacgaatacgacggttacctaagtggtcgatatcgtctgtactaccaataccttcttgtaagttaaagaagtagtttaaggaagcaagaatatcagctggttcaatgtgcttgtattctaatgggatatgaccgttaccaataataggtacaactcgatcaggatcagtcttagaatatactaaaatcttttgtaacttaactggttcagttacaaccgcttcatctgatggagtgtaagtaatagtcttaaagtcatcacggtctaagtaaggttcaagcttattaagcaattccttagttaccgtatcacctttttgtgctaatacttcaccagtatcaggatcagctaaagtttcagctaaagtttgtccaagtaaacggtacttaagcattaacttcttatttgtcttataacgaccaactggtgccatatcataacgttttggatcaaagaaacgagctgttaataagctccgtgctgaatcagcagtctttggttcaccaggacgaagccgttcataaatgtcctttaaggcttcttcaacccgagaatcttcagcgttcttgtgaacatctttatccaaggttaatgataatgtctcactatcgccaccgaacatgtcaataatttcatcgtcagagccaaagcccaatgcacgaatcaattcagtcattggtaacttacgggtccggtcgattcgaacatatgaaacatttttagcatcagtttcgtattctaaccatgcgccacggtttggaataaaggtagcaccgtagtttggccgaccatttttatcattttcttcactatagtagacacctggtgaacgaactaattgtgaaacaataactcgttcggcaccattaataatgaatgtaccttggtcagtcattaatgggaagtcaccaaagaatacatcttgagacttaatctcaccagtttcatggttagttaaccgtaaagtaacatgaagtggtgctgagtaattagcatcgtgttcacgagcttcgtcaacagtatacttaggttctaaaagttgatagtcaacgaattccaaagaaagttttccttgaaaatcatcaattggcataatatcatcaaacatttcccgcaaacctttttccatgaaccaattgtaagaatcggtttggatttcaataaggtttggcaattcgagaacttctttaattcgcgagtagctacgacgggtacggtgtttaccgtatttaactaaatgtccagccaaactgttcacctctctaatttattccgcgagctcatttaaatgttacaatttgattacaatttgcctaaaatacgacttttgggcaaaaaaaatccaaaaacagttcaacgactgtctttggcttttatgcagaatctgatggacaatagatcaccaggttcaaatgaactcacaattacatactatttaagtatacaagttctattaaatttcgtcaacaattatttttatattttttaattttttccgccccaatttgataaaccgttaataatgcagtctaggattaattggtcacgttgttctggtgtaattgaatggccaccaattaattgcgaagtgccaaaaattggagttagtcctgcaataaataattcagcagcttctttaggaagaatatcaggacgtaaccctacatctggttgacggaaaaatgctgcaattggttctagataatccattgtaaagatcatattaagcttttgctgtgcactcttcgataataggcgcattgcctgattgtattggtcataaatacttaatggatgatgtttttttaatgccttggtgatttgccataattgttcattcggtgacaaatcatgtttacgcattactttattaatatcttggcgaacttttccacataaatttgtcattacatccagatataaaacctctttatcgctgaagtggtggtataaagccggttgcgtaattccaatctgtttggcaatatcccgtgttgaagtttcaccaaatcccttttgtaaaaataactttgtagcggtttttaagattgcttgtcttgtcttttctaattgttctgctcgcttcatttattgttcatcccctatttttaatcattaattatctgataaacacattataaggctataacttatcttttgacaaccgttttagaaaaataatcatcaaatgtgataaatgaatgcaatttggtagctttttcttctattatcattagatatcattagagaacaaaagttacaattataacatttttataatacataaaactcaaatattcggtttgtgtatttcaaatttaatgaaaccagaatacaaaacggtaaattactctgcactttcagaataatttaccgttctttttatctattcaattttaattcaacagctttatcttcatctggcttttttactttaaaagtaattttaccgtgatgcgcacctactgttacgtcatctccaacattgatttcaccactaagtagtccagtactcaaatcatcttcaacatgatcttgtaaggcacgacgaagcggacgagctccataagcaggattgtaaccaagctttgcaattacatcaattgcagcaggcgtaactttcaagttaatgccttgctcacttacccgtttatttaaatcattaaccatgagtttaacaatttgatgaagctctttcttttgtaatgaatggaagataatcgtttcatcaatccgattaaggaattctgggcggaagtataacctcatttgttgcttaatcgccgctgccatcgcattatagtcttgtgacatatcttttgccccaaaaccaacttctttttcatcctgaagctgagttgctccaaggttagaagtcataataataatggtatttctaaaatcaacgcgccgaccttttgcatcagttaagtaaccatcatctaaaacttgaagtaataaattaaatacatccggatgtgccttttcagcttcatctaataagacaactgaatatggatgttgccgtactttttcagttagttggccaccctcgtcataaccgacatatcctggagcggcaccaatcaagcgactagtactatatttttccatatattcggacatatcaatccggatcatattatcttccgagccaaacattgcagcagctaatgccttggcaagctctgtttttcctaccccggtcggtcctaaaaacataaaagaaccaatcggccgactaggatccttaagaccgcttcgtgcacgccgaattgccttagcgactacggtaactgcttcatcttgaccaattactcgttgatgcagaaccttttccaagttaaccaatcgttcactttcactcttcttcaattgagttaaaggaactcctgtccattcagcaacaacttgtgcaatgttttcaccagttactttcaatttgtagttatgagaatctttttgttgagtgcgttgttttttacggtcaatcttatcttttagtgctaactcctgttgacgaagagtagctgcacgatcaaagtcttgattatcaattgcttcttctttttgggttcgcaaatcttctaactgactttctagtgaaggctgatgatttttcttatcttcagcatcaattcgaaccatagctgccgattcatcaataagatcaattgctttatctggcaagaatcgatccgaaatataacgatctgacaatttaactgcttcttctagcgcttcatcagtaattttagcatgatggtgctcctcatactttggtcgtagtcctcgcaggatttgtagagtttggtcagtagtcggctcatcaacttgaacagtggcaaagcgtcgttcaagtgctgcatccgattctatatatttctgatattcatcaagcgtagtagcaccaattgtttgcaactcgcctcgcgctaaggccggtttcaaaatattggaggcatcaattgcaccttcagcaccaccagcaccaattaaggtatggagttcatcaataaaaagaatcacatgcccgtcgttttgaatctcatcaattacttttttaagacgatcttcaaattctcctcgatacttggtacctgcaactaatgatcccatatcaagcatcatcaaacgtttattagccaattcagctggaaccttaccatcaaccatccgctgagcaagtccttcagcaattgccgtcttccctactcccggttctccaatcaaaactgggttattcttggtacgacgactaagaatctgttccacacgtttaacttccttatttcgaccaattacaggatcaagctgaccattccgagcaagttctgtcatatcacgagctagtttatctaatgttggtgtaccagtttgctgaatccgtcgacgagatgattgacgattaggattgcgttgctgactatcagcaatccctaaccgccgtaaaattacttttctcatctgtcgtggcacaacatctagactatataaaatccgtgaagatagaacactttcatcagcgattaaggctaataataagtgttcagtgccaatcttcaatgcatgcatttgttgggcttctttacctgctaacgataatacttgctttgcttttggtgagtatgggagataatctgaagctcccagattttccatcgttccatagccaattaagcgttcaatttcttcacgaatatcatcgttcgtaatagaaaattgttcaaatattttgttagcaatcccatctttatccattgagagggcaagcagaaggtgttcagtccctactgcttggtgtttaaagtattttgcttgttcttgtgcaattgctagaacatgctttgcacttggcgtgaacatattatccatgtacaatctcccttttaactttcatagcgaagtcgattcaagaatgatactaatatacgggcgcgaagttgatcttcaatcttactatcattaactgctagtgcttgtttagataatgcaactagcattaagtctccttcacgtctcgtaatcacgtcttcttcatataacgttcgaacaatatcaaaagcatcacgttcacgaaccgagtcgccaattgcttgaataagtgagtttagcacatttacgtcatcaagtaaattaactcgctcgattcgaatatatccgccgcctccacgcttactctttactaaataaccattttgaatggtaaacctcgttttaataacataattaatttgtgacggtaccacatcaaactggttggcaatctcagaacgacgaatttcgacctgagctgagtcaccaagtatttcttttaagtatgcttcgataatatctgaaatacttttattctccattatatcacctcggctcttttgactaatcttgaccattattttaacacacttttagagtcagcgcctacttgtatgatcattcagttacacatttaagaaaataataaagactagcgaagcattcaagcgcaacactagtcttttagagaattaaatatgaactacttttttaattagtcgttatcgttgtgaacaaaatcaacaacattccgaccaacaaccttgttatccttaagttcttggatcatatcattaatttcgcttaacttacgagtcttaacaattgggtgaaccttaccttctgcaccaaattggaaacattcagctaagtcttgacgtgtaccaactaatgaaccagcaacaatgataccatcaagaacagtcttagcaatgttaagcttcatgtcaccttgtggaagcgcaacggcaacaagcttaccatctgggcgaagtgaatcaactgcttgatcgaatgcagagggagaaacagctgttactacagcagcgtgaacaccgccaaccttttcttgaatttgcttatcaacatcaccgtcatgacggttaattaaaatttcagcaccattcttcttagcggcttcaagcttatcaggattaccatcaacagcgataacatgagcaccaaatacgttgtgagcaaattgaatacccaagttacctaaaccaccagcaccaacgattgatacccattgacctggcttgatgtcagcaacctttaatgccttgtacatcgtaacaccagcacaagttaatgaagtagcttcaacaggatcaagaccttctggaaccttaacagcgtagtcagctggtacgatacattgttcagccattgcaccgtcagcagtgtaacccgcattaagaacattccgacaaagagtttcacgacctgttaaacaatattcacagtgtccacagcccttgaagaaccatgcaattgatacacgatcgccaacttttaatgaagtaaccccaggggcaaccttagatacacgaccaaccccttcatgaccgataatacgacctggcttcttaccaaagtctccagcagcaacgtgtaaatcagtgtgacaaaggccacaatattccatgtcaactaaagcttcaccgggctttaaatcccgaagttgaacatctttaacagtaacaaaaccgtctactggatcgttaataacagcagctttcataaggtaagatctcctttattaataaacaaattactttttacaatgcttatagtaccacaactcctagacaaatttaaagtgaaaatttgcacatttaacgaaattaataattttattttttatttaaaacactgatataacaatgataacgcccggaaaatcaattcttttaatattgtatagtaaatcacttactaattatcactaaaactttactgttacaattttagacgctctctattaatatggatgttacaatttaatcaattagacaaaggagtggtagctaagtgaaaatgtagagcggcaatatattcgttacaataatcgttatggaacggcaattgctgctgatatctacacccctaagaatctagaagaagacaaattgttatcagccatcgtaatcggggcaccttatggaagcacaaaagaacaggcagcagcaatttatgcaaatacgtttgctcaattaggttttgttacccttgcatttgatcaagtatacatgggtgaatcagctggcgaacctcgtcatgttgcttctccagacttatatgcggaatcttttagtgccgcagttgattatccaggtacaaaagcaaagcatgtcaatcgcggacaaataagtgttatcggtatcagtggaggggcaggctttgctcttagcgctgcggctgttgatacacgaattaaatctgttgtaacaatttcaatgtatgatatgacagatattcgtgagatggctaatcttgctcctgaacaattattccagcttaaagatcaattatcaaagcaacgttgggacgattttgaaaatgggcagcctgactatcatccttccttcccagaagaaccatatgatagtattgacgatttaccaaatcatgatgagttaacaaatgagtggcttcgtttttacgctcttaaacgtggcttccatccaaatacacgtggaactgcaacaaccacttctaatttagcaatgcttgaattttctgcgttagactatattaaagaaatttcaccacgaccaatcctatttatttatggagacaatgctcactcccgttcttattccgagagagcttattaccttgctaaccaaccaaagcaaagattgatcgtaaaaaactgcgaacatattgatttttatgataatatggaaaaaattccagtagatcaaattgcaaagtttataaaagacagtttcaacgcataatcaaacgacaaaatgccaatcagtgcctcaattatggaagcctggttggcattttccttttaaatattttcggaaattaataaaaaactgctatctcttctactatagaagtgataacagttttttaacttatcggaattacaagatttgaacttgcgacctctgcgtcccgaacgcagcgctctaccaagctgagctaaattccgaaaaaataagcgtaacagttaaactgtcacgcttactataattagtgcacccagaaggagtcgaaccttcaaccttctgattcgtagtcagacactctatccaattgcgctatgggtgcatataagcggaagacgggattcgaacccgcgacccccaccatggcaaggtgatgttctaccactgaactacttccgcatgtctctgataagttattccctatcaacgattattaatattacacgaaaatctcatcaatgtcaacaagaattttcaaaaaatattaaatgcggatgaagggacttgaacccttacatcaaaatgatacaagatcctaaatcttgcgcgtctgccaattccgccacatccgcaaactaatggaggatacagggctcgaacctgtgaccccctgcttgtaaggcagatgctctcccaactgagctaatcctccataaataggcttgctatataaatcagcctatttaatatatcatctatatgattttttgtcaaatcctatttaagatttaattcaattaatttttcatcaatcatggctaagaccttcttagcagcagccggatcttcaacaaaatcatatttatcaccatcaataaccatcttaggactttcattataatcctcataccattgaacataacgttcgtttaagtttttataatatgaatataatgaagaatcattagcaatttgttcaaatgaacgtccccgtttcttaatccgttcaagcattgtctcaaacgaaaccctaattgtaattaaaaggttgggggctttttggtgtggttgctctggtaattcttccatcatgttacttaataatgaagaataaatatttgactccgtttccgtagctcgacccatatctgcgtttaacttgaataataaggcatcttcaaaaattgaacggtccaaaacatttaaatcatttgagtatgaatctttaatctcatcaagccgcttgtttaaaaagtaaatctgtaataagaaaccatattttttaggatctttataaaaaagcggcaaaattttattgtcatcaacagattcatagaaggcctggctattaagatggtctgccaacagctttgtcaaactggtctttcctgcaccgattgtcccagctatagcaatcattagttatttccccctgtttcaaattcaaaaagtaacgaaaacaattctaacatttaaaataaaaaggagcgagtattttctcgttccctttttattttattaatcatcttccggttcgtacgattcaccctttgttcgccttgataaatcaaccttatcaagcggaatcaagtgcgtcttgtaacgaatcttgtagtagaagaaaagaattaagaataatggaattcccatgtaagtaattaaaatgttttgccagtccatttttacaaaagcatcaatgttttgaccacaaataacgacaatacatagagtaagcgcgaatactgggccaaatgggaaccctgttgcatgatacttcaattcagacagtgtatggccttgcttaagaaatgccttcctaaagcggtagtgggaaattgcaattcctaaccatgcaataaatccacacaatccagatgcaccaattaagtagttataagcttcgggaccaatgaattgggttgcataggctgctaatgaaacaaccatcgttcccagcaaagcataaatcggaataccatgccggtttacataaccaaaaatccgccatgcatatccttcacgcgcttgtgaataaagcatccgggttgaagcatataaaccagagttagcagcagaaatgacggcagttaagataaccgcattcattgcactagccgcaaatgctaatcctgcccgcttaaacacaatcgtaaatggactcattgtaatatttgaaacgtcttgattcaataagttcttatctgtgtaaggaaggatgcaggcaataacaaaaatagcaaaaatataaaaaagtaaaattcgccagaaagttgaatggattgcctttgagacagacttttctggtgtagcagcttcaccagcagtaattccaactaattctgttccttggaatgagaacccagcaaccaagaaaacactaataattgctggcacacctccaacaaacggtgcctgcttatagtggaagttgcttaatccaactggcttaccacccataattccaaaaataattgcaacaccgacaattaaaaatacgataactgtgacaactttgattaaagcaagccaaaattcagtttcaccataagatcgtactgataaataattgattaagaaaattaatgccatcactgttacactaaaaatccagcctggaacattaggaagccaataattcattacaattcccgcagttgtaacatctacggggattgtaatcgcccagttaaaccaataattccaaccaagagcaaaacctagtgctggatcaacaaattttgttgaataagctgaaaatgacccagttaatggcatatatgttgccatttcccctagactcgtcattaggaaataaaccataattcccataattccatatgcaactaacgctccgccaggtcccgcagttgaaatagcggatccactggcaataaaaagtcccgtaccgattgttccaccaagagcaatcatggacaagtgacgtgtctgtaatgtccgttccatatgacccgtcgacttagattcatctgccataaatatatttcctccaaatttgtgtgccttaacgtcaacattttcgaagaggataaattaaaagggtcttctgatcggtaaccccaccagaagacccaacttaatacctataattaatcgttgaatcaatttaggaagcgccccgcaattattgcgacagtctatagcctattgtgactatagcccaacatctaccagaaataagctaagtagtgtttcggcatattttccttttactaatactccggtgcttattcacctaatactagttactgataaaatatgcaacctcttcatcgaatgaaattataccccactcaaataaaaatgcaagtccgattatttaataatgcattgccataagtcatccttgtcataagtaaaaccacatttaacaagtactcgctgagaacgataattgctttgtttgcactccgcatgaatcgtaattttagatggcaaaatagaaataaatttttgaagtgcagttgtcattatgcctttattccattggttttgctgcaaaagataacctaattcataatgatgagcaattctttttccttcatccccataccaagcacttaatacaatcatccccactacatcttcatttagtttcactaccattacatgattctggcgaacaaacatcttaatagcttgcacacgtttttctctttgaagtggtaaaagcagtcccactgcttgtgttaagttttcattatccaacaatttaactattgctcctaaattgttattagtttttgctgattcaattataatttcactcatttttctcctatttcccgggaaataaaaaagagaagcaaccaaaaagattgccctccatcaatttcgattattaaatttcaatactacggaagaacggaatccgttgcaatcgtggtgcccaagcgacatagagccattcagctacttgtaaccatgcataagctaataacattgcaccaatagtatcaaaaggccagtgagcataaagatatacccgcgataccgccaaaaagaagactgcaaatattaataaaatttgcaaaattgtgcggacagatgctttttgaataagcggaattacaattaagaataaaattgctactaccaagaagaatcctaaagtgtgaccactagggaaactatagccatcatctgctgccaagtgttgtgcaggacggacccgcttaacgatgtgtttaataattgttccaagcacatcaccaccaaaaatcgttcctaatgaccataaagccgggatgcgatagcccttcaaccataaaacacctgcaataataaatacccatactaaatctaagaccggtttaactaaaaatgaaagtaagctcatcaaagcatgaaaccaaccaattccttccaggcgctgactagtaaataacgactgcagaacagcatcaatcattgttagcactgacgaattaaacataattaatagcatcaatgcgataaagaaaccaccgcttaaggcaaagcgccaccaccgatgatcatcacgttcaataaacataatcaaggattctcctaacttaaattaattaatcaaaaataagtataccacagtgtcaaaaattccatcgtgactttttgattaaatatttatgaagatagttcaaaacacgatttaaaagctctcccaaaccaaagccaagcgtaattgcaccaacaatgacaactacctggtagaaataaacattaacaagatggtaattaccaatagcaaaattacgaaccattttataagcctgtcctccaggcacaaatggaactagcgcgggcacattaaaaacaataattggcattcgttttcgacgagctgctgcctggcttaataccgaaattaagattgcagcaactaaattactaaacgcaaggccaatgccactgcaataatacattatccagtagactacccatacgcctccaccaatcatccccgcagtatgataggcacgtttaggaatatttaagaggataccaaaacaaactgtcgaaacatagcataagaaaaattgtaataataggttaccccaattcatctcctaccctcctaattaaagtgcagaacaattacaattgcactaccaatcgaaacggcagttagaatcgcctcaatccctcttgtaggtccactaattaagtttccggaaactaaatcccgtgccgcattagttaagggcaccccaggaaccagaggcataaccgcaccaataataatatcattaatattattagcaaggtgcattttaacaaagatcaccgccaaaatacctataattaaggaagaacaaaactctcctaaatattgaatcttaaactttcgtaaaaggtatgaaaatgctccgtaacctacgccacctgcaagaaagccagcccaagaatcagaaacattacctgtaaagacaatcattaatgcaccacttaaaatcgcagcagcaaatgattcataccagttttgccatcttgacatcttttggtgatcaatcctttttaatttagcaaatgcttgtggaacatcaattttgcgccgtgctagttcacgagaaacttcattgacatccgcaattttacttaaattgtttttgcgatgacgaatagtaattacttgggcatcaggttcattaatcgtcccaactacaattccagttacggttgtaaaagcctgaaagccatgaagtcctgcactttttgccattcgggataaggtgtcgttaactcgttccatatttgatccattttcaattaaaagtctcccagctagcaaacaagtctttagtgctagtgcttgtcgtcgtttcgttaacatcttttcgccttctctgttcaaagatatttattattatcctctgtttagataaggagctcaatacaaaaaaacggccggaaaaatccagtcgttttttgtatttagtctttaactacatttgcagcttgaaggccacgttcgccttcttcaacttcaaacgtaacatgttgtccttcgctcaatgacttaaagccatccccttgaatagcagaaaaatgaacaaacacgtcatcgccgctttcacgagtaatgaagccataccccttatcgtcattaaaccatttaacagttccttgttccatgttggaaatcctcctgtgcattaagcactaatataatttgtaattcgtctcaggtgaagagatccatttgcaatgaaacaatcgaaccaaccgcacttaaaaaaactacaaaaaccattgtatcacataagcaatcatttacataattaacctttattttcttgagctgtgtccggttcaataaaaatattatgtgaggccttatatgaaacattaatttcttggtcgttatcctctttttgaatcacaattggtccttcaaaaggctcatggcgaattacagttacttgttcctgaggtcgtaatcctaactcttctaagtaagtgagaagttcatgattatctaagaatcgttctagttcaactttttccccatcatcagcatctgctaataaacgatgtgttacatctgggaacttgccattagctgatggaattactccaccatgcggacaatgatcagggtgttgaagaaaagcatctaaggccgttgctagtcgatcacttgtctgatgttcaagaatttccgcttctgaatggacgtcggcaaaattgtagtgaagcttatccactaaaaatgtttcccataaacgatgctttcgaactaattctgcagcatacttttgtcccttttcagttaaagaaataccagcatatggttcatgaacaactagcccttcgtcagccaacttagaaatcatctcggttactgatccagcggcaattcctagtccaagggaaatctctttattagaaacttttttatgactaccacctaattcaaaaataatttttagatagtcttccttcattggagtcaaattgtttcacctctgggtattaaaatttggcctacgatcggtcattatgtgtttttatatattaacattgaacccaaattgattatagcatattattaaaagtgtagtttggaaagcctaacttttttgttataagctttttataaacccgcaatcgatctttacggaggagtaggtaaatcatggacgaaaaagtaacagggaaacgctttttagcagttaccctcctaaatgtattaattacaattgttgaaatcttcggaggtattctttcaggaagtttagccttactatcagatgcttttcataatttaggggattcgctttccattgtactaggctactttgcccagcatattggcgggcaaccagagaatcagcaacgaacttatggctaccgtcgagctgaaatcctctcagcattaactaatagtatttttttaattgttatctctgtctttttaattattgaagctattaagcggttagagcatccccagcatattaacgggggcattatgttaactgtagccgtgattggtctgcttgccaactttatttctgcagccctcttacatgccggaagcgaagacagcttaaatgtcaaagcaacttatctccacattctaagtgatgcactttcatcagttgccgttatcattggaggaatcattcttacctttgttaatgttccatggcttgatcccgccttgacaattggggttgccctctatattgcttatgaggcttggccaattattaatcaaaccattaaaattctcatgcagtcctccccagatcttgattataattccatcgaaaatgatttaaagcaaatcgacggagttgcggcagttcatcacgtccatgcatggatgatggatgaacaccgaatcattttctctgcccatcttaattgtgatgacttgccactaagccaggttgagcgaatctatagtcaagtagaaaaaatcttgcatgaaaaatatgggatctgtcacgttactattcaagcagaatatcaccgtgggaaagatgaaaaattattcaacactcctgttgatgaaaagaacgttattaataacgatttcaaagaggactaaaattaaaaggaagcaaaaagttgagcgaaaactcagcctcttgcttcctatttttttacatcgattaaaataattttccgactccatagtgaatcgtaatcgtaatcaaaccaataataatatttcgaataactgcaatttttacaagcccgttcccgagtttagaactgatataaccggttagagcgctcgtaaaggcaactgccaaaatcacggcataccacttatatgcttcgggagcaaaagtcatcgccatcaacggaattaatcctccggcagctgctgaaaaaagagaagaaaatgcagcatcccaagggttaagatagtgaccaagctcaacatcatacttaatccgaacaactgtctcgaggggctttttattaaggagatccttagcaattttgattgatgtttcaggagtaactcctttatttacataatagtcttttactgccgcaagttccccttcataatcgtcctttaagagttgctcttctttagcaacggccgctttttctgtatccttttgagtagatacagaggcatattcgccagaagccattgaaaatgcacaggcaagcaaatcagataagccagcaatgaagatagtaaaacggtcacttgtcgctgctgccaccgataccaaaacaccgacaacagtcaaaatcccatcatttgaacctagtacccctgctcgtaacgtattcagtttttcttccattgtttgcttctgatgctttttcaccttaatactcatttaatctcatctccctaccgcgcaaataattgtccaatcaggtacgtaacccccattgttaataatccagcagctgcattcctgatcatcgatttaatccggttagattttcctaaaaccgccgcaaaataaccagtaattaacaaggcaattaaaactgcaattgcggttgctaagattcgaacatttacgggagaaacggtaaccgccaccattggtaaaattgaaccagttggaaaggatataaaggaagcaatcgccgcagcatatggacttgtaaactcattgggattaaagccatagcgctcttgaacagctgtccctaaagcatctttttccattaattctttcgtcgcttgtttagctaattgcgaatcaatgtcttgagcttcatatttcttttgaacatagtcaaattcatgctggtattgattctgaagccgctgcttttcactaatcaaagccattttttgtgagtccttttgggtcgaaactgagacgtactcccccatacacattgagatcataccggcaagtgttccggacaaacccgcgattaagatggaacgggcattactcgttgccgctgccaccccgataacaattccggcaattgaaataatcccatcattagcccccatcacacttgcacgcagaacgtttaccttttgtgctagtgacatctttttcttggacacatttatcccttccctctttcagtttagaatcattataacatagagataagtaaaaacaaccaaataatcttcaaatgatattctatcttagaatcattaaaaaatatactttcatgtaaaaagcgatagtcctaatcagaactatcgcaataatcttaaaaattaaattatttattcataagcctgaacagtgtttgtccgaataacaaatactgacgttccagcatgacgagccatgtatgatgcctgagaaccaaccgccttacgattacccttcttaccaattgaaccaacaactaataaatctggctgaaaagcggggataacatgattacaaatccgctcagctggccgctccccacgatcaacaatcgccgtaatcttttctggatcaacgccgtaatcaattgctgcttggacatattcatttacccgttgacgtaattcgtcttcactgctatgaacataatccttatctaagatttgatatacatttacccggtcagtttctagaattgatacaattcctagctctgaaccatcacgtttcgccttatcaaccgcgtatgagaaagcggcacgggcatctggtgcatcgtcaacaccaacgaggatcttcttgaacttctttggctttatttcgaacattagtattctcctccctatgttctacactttaacggtgaagcattactcgctcctcttcgttaaatcatattcttcactccttatgttactacttatctcgattttgtaaataattattttggccttcctaaaataaaagtgatttattaaagaattttataattattttttcaaattcacttctacacaattctcattttgacgacttatagaacaatcgatataataaaagttacttacttcttgataatatcaacgaaatggggttaattatttcatgtcaatgattgaatttcataatgtacaaaaatattatggcaagtttcatgcattaaaagatattaatttaacaatcgatgatggtgaaacagttgttttaattgggccatctggctcgggaaaaagtagtttaatccggaccgttaatggtttagatcctattagagacggtcaattaatcgttaatgggtttgaccttgccgataagaaaaccaatgtaaatttaattcgaaaagatgtcggaatggtctttcaacactttaacttatacaacaataagagtgttatcgaaaacataatgctcgcaccacgaattgtattaaagcgtccggaagaagaaaaccgtgagttagcaatgaaactgcttgataaagttggccttgcaaataaagctgaaagtatgcctgctcagctatctggagggcaaaaacaacgaattgcgattgcccgcagtctggctatgaagcctaaatgcctcctattcgatgaaccaacaagtgctctcgatcctgaaatgattgatgatgttttagacgttatgaaagatatcgctaaaaactccaacatgacaatgttagtagtgacccacgaaatgggctttgcacgggcagttgctgaccgggttatttttatggcagatggtcggatcttagaagacgattcaaccgaaaaattctttggcgaccagccttctacagagcgtgctcgcgaatttatgagtaagatcagtggtcactaaggaggaattataatgaaaaagtattggcgattgattagtcttagcgccctcctctttgttgctctccttactctttctgcctgcggtacctcaattgcaaaaaaagatgttctgaccgaagatatgcgtagtcaacgaattacctggggagttaaagcagatactcgtctctttgggctggaaaatatccggacaggaaagctagaaggatttgaaattgatcttgcaacagctattacaaaaaagatcctcggcccacagggaaaaccaatttttgttcctgtaaccagcggaacccgggtgcccctattaaaaaatggtaatattgatgcgattatggcaaccatgacgatcactcctgagcgagaaaagcaagttgactttacccattcttactttgatgctggtcaatctctcctagttaaaaagggaagtccaatcaaaaacatcagcgatttaaatcgacgaggtgctgtaattcttggggtttctggatcaaattcagttaaaaacgttgcgaagtttgctcctgaagcacgtgtccttcaattatctgactatgctcaagcgatgacggcccttaaatctaaacagggggatgcccttaccactgataatgggattctctatgggatgcagctgaaaacccaggctatgaagttgtcggcggtaactttactaaagaaccttatggaatcgccgttaacaaaaatcaaacacgttttcgcaataaattaaactgggcgttaagagaagttgaaaaggatggaacctacaaccgtcttcttcttaaatggtttggcaatgttaaaggatttaattatcaggagatgaagcgctaatgttaaatttaattataaatgagtggcatccccttttaaccggcctctggaatactattctatgtagccttattgcactaatcgggagccttattattggaaccttttttgcccttctcgagatttcgcagcatcgggttttaaaaatcatcggtcatgtctatgtggaggtctttcgtaatatcccactattggtaattacaatggcttttttcctgattatcccaatgtatgtagtgaaaattaatggatttactgcgggaacaattggcttaactctttatacgtctgcatttattgctgaaactgtgcgtgctggaattaattcaattgatcctggtcaaatggaaggagcccttgccaatggacttacttatggacaagcgatgcgctacattgttttaccacaagcatttcgcgttgttattccaccacttggcaatcaatttatcaatttggttaaaaactcatcggtccttgcctttgtcgctggctttgatcttatgtaccaaggaaatctaattgcaaacgataccttagcaactatgcccacgtatttcattgtcgggatcatgtacctcatcatcacgcttccgttgagttattatatgcgacaccttgaaaagaaattagcctaggagggatgatcaatgcaaaactttattgacgcttattcatggattaatatccgtttcctcctagaaggactttggattacgattgaagtttccgtaatttcaattataatcagttttattttgggaacttttctcggaattattcgttacgctaacatcaaatacttatcagcaattgtaggattcattatcgatattatccgtaatcttcctctcctgctaataattttcttcacctactttggcctccccaatatcggaattaaaccagaaattattcctgccgcaattatggcgctttcaattttcgaatcggcaatggttgctgaaatcgttcgctcagggataaattcgattgattacggtcaaacggaaggggcattagctaatggattaactaagtggcaagcattacgaattattgtcttaccacaagcaattaagaatatgatgccggctctcgttagtcagttcatttcattagttaaggatacatcactagcaacaatcattgtcttgccagagttaatgtaccacgcccagatcatctatggtcaaaacacaaattatattattccgatgttcgttgcgttagcagtcctctactttattgtctgctactcattatcattggttgcacgttatttgcataaacacattgcataagtataaacagaggctgagaaaaaactgttgtttttctcagcctcgttttatatgaatattgttacgatatcgcggaaattaaccacaaggcggttaatttccactcacttatttaatactgaatcataaagtcaaaccgttgatgctctccggtcaagcgattaacatgccgttccatcacttgacgtcgttgtccaaacatcatccaaacggcgattccaataaatactactaattctattcccgtcccaatccaattttgaactgttactttgccagtcatcaacgttgaatcagaagcaataaatgccgtccaatctaataggaagtgcattaccattgctagccataattgaccagtataaacataaacggttgcaaaaaatagtccaatcccagctgcgctaactgcttgtaaaacagtcattgaccattcttgagggccatagttggtaagatgaacaattccgaataaaattgaactcgttgccaatgccaacggaaggcgttgcttaacattgcgccaagcatagaataagatgccaagaatagcaaaacggaataaggtctcttccattaccgcagcctcaaacgccgaaagggtaaaatcccaattagcacggtggagccttggcatttctcccgtatttaaggccataaagataatatcaacaacaactaatccagcaaatatccccaattaaaatcaccgctccagtgtggttttaatcctggccatgataaatgccacgtccgcataacagttgtcgtaagaataaagaaagcaactgcgccaactgcaccagtcgataatgctaataataagaagtgattatcaaccaagtctgttggtaaggcaatcaatggcgtaaaaaccacctgagctaaccaggcaataaagattagccgttcgatgctccaatgcatgaactcaccaattacgcttgcaaatggtgcaaacataataaagtaataaaaaatcatcattgtcacaacgccccgggatggtaaatgtaatagaacaataatttctcgaaccattacatcccaagcaaacactaaaattatcggctgggcaattacctgcagccatgcattcaactttttaactaacaaggatacattaggtaagagttcaaagactaaaccaattcctaaaataataaccatgatcaataatgctaatgcaacagtctgacgattaaattcgtaattacgaatcatcatcattgccaaaatgaccagggtcgccccaatttgaacccggtaccagatcctaagataatcgtttccggtcatttttcctcatcctctctgggaaatctaaaataattgctaaatatgatcataccaaacaatctccttagttttaagaacaaatcttctttttttagtttaaaccacaaaagaacctgcaggcaaaaaaaccgcaagttcttttatcgtttattttgtgtttccagttgcaactggttgcttctctttactattcttctttttagaatgttgctgagagttccggtgggaatgattattttgtcgttcgtttttatgtgtttgattatttttattgtttggtcgacgatagtgttggttttcggaacgattattaccgttcaaaattgtcaccatcggaataatcactggacgacgaccggtgcgatcatagagtaatttttgtaaacggctgataattgtccggtttaatacccgttgatcaatgtgtttgtgattcttaaatgtattaaggattgcccagaatacttcatgattggctgccttaatcagctcttgtgattcatgcatataaacaaagccacgagaaacaatatcaggccccgcaacaatttgataatcctttaagtcgacaaccgcaatcgctgttacgacaccttcttctgaaagcaagcgtcgttcgcgaatttctggatttccaaccgtatctcccgcatcacgaccatcaatataaacatcactaacactatcaatatggtccgccactcgacaagagtctttcgtaagagctaaaacatccccatttgcaaggacaaagctattttcctttggtacaccagtcatttcagctaacttagtgtgaattttttgcatccggtattcaccgtgaaccggcgcaaagaatttcggcttcatcaagcggagcataaactcttcatcaacttgaccaccgtgcccggatgtatggatattgttaacataaccgtgaataacattagcaccgtcttcttcaagcttattgatcaaggcattaacgctagtcgtgttacccggaattgggttacttgagaaaacaacggtatcctcaggctgaatggtaatctggcggtgagttccgttagcaatccgactaagcgccgccattggttcaccctgcgatccagtacacatgatcaatactttttctggtggatagttattaatttcgttctggtcaatcaatgagtctttagggatattcagataaccgagttcttgaccagccgtaatcgcattctccatactacgaccaaaaacagcaattttacgcccttgagcaatggctgcatcagaagcttcacgtaaacgatagacgttagaagcaaaggatgcgaaaataatccgtcccttgatccgttcaaaaatacgccgaatgtgaatatcaacccatcgttcagacttagtaaattccggtcgttctgcgtttgtactatctgaagtcaatagcagaacaccatcatcgcctagtttggccatttgttgaagatttggaccaggtaaattaccaaccggtgtcaaatcaaacttaaagtccccggtttgaacaattgtcccttgcggagtatgaactgcaatccctaatgtatcaggaattgagtgggttgtccggaagaaactaacccataatttcttaaagtgaacctcatcaaattcattgatttcatgcaattcggcatttcttagtaagtgtttttcttccagttttcctttaattaatgacattgcaaatggtccagcataaataggtgcattgaccttttgtaagaagaatggtaatcctccaatgtggtcttcgtgaccgtgagtaataaagattcccttaatcttatctttattttcaatgaggtaatcataattttgaattacgtaatccactcctagtaattcatcttcggggaataaaactccacagtcaataacaataatttcatcttggaattgtacacaatacatatttttaccaatctcaccaagaccacccatggcgtaaaaggcaacttcattgtttttaatctttaattttgtcataatacctttccttctatagatttttatcatgttaattaacggaatttaagtaagccaaaagaaccgctttgttctgacaaggtcggttattgatattcattttattattggcacttaatcttaattatttaatccgtacgtaaaactaactactattttaccacatctacaaaattgaaggtagtaattgcctaattctttgattaaaaaagaaggtgggagaaagtatttatctttactccaccttcctttttaaatcccactagttgcttgcctaatcttcttctggtaactgttcctctttttgttcccaagccttcatccaatcaacaaccggttccccatcttcatgaaatttaacattagtcaatgcggttaaaattttttgataagctggcttacttagccgcgtgcttacattaactaattcctgatgacccataaaagcattatcgcacaagatttgattaattgtagccattaattcattagatacttgtgagctaaggatctctaaactgcccctacgatattgatcaacataaaaattaataaaggaattaagggcaacttctttagcatcctcgcttaactcactataacttaaacctgttgtagccaattgttattcttcctttctcaaattaatttactttggttatcctctacattttaaccttaacacaaagtttattatccgttaattttccttccgatcccgaatacgaagactagtattttcaccatcaatcactgcatatacttcttttgtggaatcttcagctaatgcacccagcttaacttctccactatcttctccagtttgttctacctctttgataccgtccgtaataaaacgggtaaaaatcttatgaagttcgcgccgtttacgttccttttttacagccatcgctaaagtaaagccttgatccaaaaatactttaatcgttaatacctgaaaaattgttggaaaactaaaatagtgatttttattctgctcatcttgttcagatttaatataaccctttttctcccaatatcttagttgactagtagagacaccagttacacgtgctacttcactcatattaatctttaattgtttactagcgatcatttttctaattttttcagaaagcggatccattatttcctccaaagtgtatatttcaatcataaattaccaaaaattcgatatctttgtcaaataatttgacaaagatatcgaatagtattatatttttcacattgttaaaaacgtagaggaggattctattagtgaatcaagagcaacaacctgttgatattaatggtcaaacttataatcgttccttaatgatcttcgtcctattaattggagctttttgtaccattttaaaccaaactattctttcaacagcctttcccgcattaatggatgcttttaatattagtactgccaccgttcagtggttaactactggtttcttaatggttaatgggattatgatccccgtaagtgcctatttaaccagtcgttttaatactaagagtctttttatcattgctatgtcaacctttgaagttgggacaatcttagcatggattgctccatcgtttgccgttttattagccggtcgtcttatccaagcggtcggagtaggaattaacatgcccctaatgcagaatattatgctgactgtttatcctcctgagaaacgtggcgctgcgatgggagtaaacggcctagttattggattagccccagcaatcgggcctgctctatctggatgggttatcgatagttatagctggcggtggcttttcggaatgatcgcccccattactgctttagttatcattgttagtttttttgcagttaaaaatgttattcctaataaaaagccgcatcttgactggctttctgttgttatttcaacattaggatttgggagcatgctttacggattctcaagtgtcggtgataaggggtggacagatccggttgtcctttcaaccattatcattggggtgattttagttggaattctaatcatgcgtcaaaacaagctagacgatccgttccttgaattcaaggtatttgaaagcaaagaattctcccttgcgaccattcttagttcaattgtaatgatggcaatggttggggtagaattcgtcatccctctttaccttcaaatcattcatggaatgtccgccttccattcaggtcttacccttttatttggagcccttttcatgggaattatgagtccaattactgggaacttatttgaccgtcatggtgctaaacgcttagcctttacgggaatgtttatcttaactgttggaacaattccttttgcctttattactcgtgataccccaactatttatattgtcttcttatatgcagtccggatgtttggtatttcaatggtaatgatgccagttactacagcgggaatgaattctcttccttacaatctaatttcgcacggtacagctgttaacaataccattcgtcaagtcgctacttctgtgggaacagcgatcatgatctctgttttgacaaatattaccaatagcaatcgacctgctcattcactgctgacacaatccccattacaatataaagcaaagatgtttgatgctactttgatggggtaccatgcagcattctggtttgcaatcgccttctcactcattggtttattccttacattctttgttacaagtggtaatggaattcacctccgccttgatagcgaagacattgcagaaccaactgataaaggagggatgaagtaatggttattattttaacttttctaggagcactcgccttttttgcttgcatgatgtttattcggcaaaaaagcctgcgaattattttagctacactcacgggaattatctttgtgggctcaactcttttgatgacactaaattacagtcaccattttggaatgcaaaaagttacgacaacaaccaccaagcggatttactctgcttcaaattcctcaatgcccctggcaatttatcaaccggttggtaaaagcggccgcgatgatgtttatatttataacaccaaagttaaacaaaaaacgccttaccatacccaagcaaacgaatacaccactagtcgaattaaatggactaatggttctacccctcagctcgtaacaactgagacgcgctggcaatatcgtaataatttttataaagtcctatatgcatggtcaggaatgaacaatgcattagttaagcgaactaacgtgttagaatatccacgaatgtatgttaaactcacaacgagtcaggcagataaacttgccagagttgctaaatctgctacgggtgccaaattacaagcacaagcagcagaacaaggacgcgcttttgttacatcaaaggttcaagcagcaatggctaagaatcctaacatgactgctaaacaaattcaagaagtatcagcacaagcagaacaagaatttcaggcccaaagcgttcaacaaattttaaaacaagttaagtaaaaaatagagactaagagaaaaagcaatctctcctagtctctattttatatttaatctaattcaaaaatactggtggcaattctgaggtaaatgtcctttgtttaagggtaaagggatcgttaaaactaattttacttgcatgaagcaactgatgatcatacttactagtatcgccgccataaagatggtcaccaattaggggatgaccaatagcagcaaagtgaaccctgatctggtgtgtgcgtccagtgtgaagtcttacccgtactcgtgtccattttgcgcctcgttcttcaacccaatactcggtcaaagctcgttgcccattctcgtcaattacccgtgcagcctgcccatcctttcttccaatcggcttgttaatctcgccatgctcgtccataacctgtccttctactaaagcggtatattccttcagcatttgatgttgctgcacttgctgactgatcatactggaagcgatatgatgcttagcgataagaagtaatccccccgtaaagcgatccagtcgtgtaattaaatgagggcggagatctgcagaattatttgcgattaagtatccctttacccgatttaaaaccgtatcattttgaacggttggtcctgggatagaagtcacccctgctggcttatctactaccaaccaattatcatcttcataaacaacatttaagggctcattactactttcaacagtatcatcagctaattctggttgagccttaatggttaaaggttgattaggaagaatctgggttgttggccgtaccttccgatgatcaacaaggaattccccttcaccgtttttaagatcgttaaataaacgatgccccatccccaatgactgaagatacttctttattttaatcggttcggttcctcggtatatccacgtattttccatcttaatttcctccatcaacattgaaaaagatacaaaaaaagagctgatgacctaaatcacagctccttaatattgaacggtccgtacgagactcgaactcgtgatctcatccgtgacagggatgcgtcctaaaccaactagaccaacggaccaacttgacaacaaataaaagtatacgagatttatcgaaattagtcaacaaaaatttgtgatttatttttgatttttcgtttttcctatctataccgtaaaaattatcaatagtttataatgaaagtactagctattattaaggaggagtttttaatgcagcagttgggcaagcgcctattaaactggtggtctaagtattcaaaaatcataaaagtagtgtttgtaacctcagtcctagtctttgttattctcgcgttaggtaacttttttaaaacagttaaatggcatgaagtaggagttggtttagcaaacctgtcttgggaaagtatcatcctgctactaattacgggatgcatcgcagtcatccctatgttggggtatgattttgcaatcactcatttattacccgggaaatttaagaaatcatatattatccgctgtggatggattactaatactttaacaaatattgccggatttggcggaattcttggttctactttacgagcatacttctatcgaaagaacgcaactaagaaagagattctacttgctatctctaaaatcgctgttttcttactctctggtttatctgttctttgttgggtagctttgatcatcatgtttgtgtttcacgatggcggccacttcaaccaatacgcactttggcttgtggggggcggattatattttccaatcgttttttattttactgttattcataatagtaaaatatttaagaatatcacgcccaaagtagggacctttttagtcaccagttcaacttgtgaatggctatttgtagcactttttttcttactagtcggttggtgcttaggcgttcggcatagccttattagcgttctgccattatacgttgttgcccaagttctcggggttctttcaatgattccgggggcacttggttcgtttgaccttttaatgatgttagaactgtcattacttggcgtttcccaaactacctctgttatttggttattactattccgaattttttactacatcgttcccttaattattgccggattcatgttcttgcactctcttgcatcccaagttaaccagtttttcgacggattaccattgctaatggtccgcaaacttgcttactatttaattacaacgtttatgtatgtttctgggattctgatgcttattactgcctcaattccagacatcacagcacaaaataagattatcgcgaacctttatccctataccttcttcttcctccaccaattgacaaccatcttatttgcactggctatgcttgcctgtgctcgcggtcttcaatcaaaggtgaaaaaggcataccttcctactttaatattattggtaattggaattgctaataccatttggaacctgggaacattgagcttaacaatttacctcgtcattgttttgatacttgttttactctctcgccatgtgttataccggaagaaattggaatattcaattggaaaattcgcaattgatagtcttatctttgctggagcatgtatcctctatgtaattgtcggggttattaatgctcctcaatattccagtaagcaccacatccctgattttctatttttccctggtgaaaagatttggatttccggacttttcggattaatcctcggcctcttattaattttcgttattctgcgctactttatggccgggactgatcctttcaatattccaaacgtatttgatgctgaacggatccgcaatgttattaaagaatatggaggaaatgaaactagtcacctcgccttcttaaaagataaaagtatctattattacagtgttgacgatcatgataagctctttttcatgtatcgccgtaaatatgatcgcttggtcgtaatgggcgatccagttggagataaggatagttggcgaccagctcttcgacaatttgtcttagaagctgataagtatggctatcagcttgtcttttatgaagtctccagcgatatgacaatgcttcttcatgaatttggcttcgactttattaaaaccggtgaaactggccttgttaagctggcagactttacgcttgctggtaagcgacaacgatcacaacgagcattgatgcataaatttgatcgtgaaggctataccttctctgttgaaaagccaccatttagtaaagaattaatgcaagagatgaaacaagtctccgatagctggttaggaaacgaaacagaaaaaggattctctctcggtttctttgactcctactacattaatcaagcacctgttggcattatccgtgataaagacggcaaaatggtcgcctttgcaacgtttatgccgacagggggtaaaaagattttaacaattgacctcatgcgtcatagtaaagatgccccttctggaatcatggataaaattttcattagtatgttccagtacgggcaggaaaacggttatacctactttgatctcggaatggcacctctttcgaatgttggcgaatatcaatttagctttattgaagaaaaagctgcacacttcatctatgaatatggatatcatttgtatggctttcaaggattacggcgatacaaagataaatatgcgacagtttggtattcacgttatactgccttccgcaagaagaattcaatcattgccacaatgatgattctagttagtgtcgttaaccaacgtgttgatcagcaaaaccaccgttcaatcttctggtggttgattaaataatcgagtaggagataattgattagttcaattatcgacctctcacaccaccgtacgtacggttccgtatacggcggttcgacaacttaatcacattgaattgactggagcgtcttggacatattcataagtccgagttgttccagttttctattagttagagaatagctcaaggtcttactgtgtgcagttcgccagtagcccttgcgggtactagcgaagacatatgcatcacgctgggacagccccagcttctgtaagttagttaccttagttttaagcttcttccattgcttccagatatactgtcttattcggaccctcaaccacttgtcaaggcgttgaataaagtcagttagttttccaattgagtagtactgaagccatccacgcatttttcgctgaatttcttcaaacattcttgtcagggatattccacgattacgtttagttaataacctcaatgctttctttactcgttgttgcgattgtttagctggacgggcgtaggctccattgtggtctacacccaacgaaaagccaagaaactttaaccgtagcgggctaccgactttggttttatctgggttcactttaactttcaatcgcttttcaagaaactgggtaatgcttcgcattactcgttctccggctcgttgacttttaacataaatgttacaatcatccgcatagcgcacaaagtggtgaccacgtctagtcaactctttgtccaactcatttagatagatgttcgccagtagtggtgacaatggccctccttgtggggttccttttccactcttagcgaaaagcccatggtctaagactccgctagttagaaacttacgaatgagtcttagtgtccatgggtcatcaatatattgttggagatacttaatcatcaagtcatgattaacgttatcaaaataggcttttaggtctaagtcgacaactcttcgataaccttgattataaagatctactacttttgcaatagcgtcgtgagccccacggtgagggcggaagccaaaactattatcagagaaaacacgctcaaagataggtgtaagaatttgggccacagcttgttgaaccattcggtccaccactgttggtattccgagttttcttactccaccattaggcttcggaatttctacccgtttgactggtgctggtttatacttgccctcacgcaaactagcgatcaactccgtcttattttctctgagatatggcagaaggtcattgactgtcatatcgtcaatgcctgctgcccctttatttctcttaactcgcaaataagcctgattaaggttattgcggtccaagactaagtcttggatagtgacactcatacctttaccttcaccataatcggtactacgcgcccttgtgtactttcggttttccaaacctatcctcgacaagcggtcagcttgttgttctgttttctgcgattgtcgcacctgattacacctccgatataagttacaagttattgtcgttcagtccttcatctgattactcagactactatgacctcggctgacttctggcttactcaacgctacatcactgcaccgcttgtttctgtggaaattaaacttattcctcttgtcggaaacgtgtaggccagatctccccgggtaaggatattaactttcgtaccatgtcaccggtagctttactgaaagtaacttcgagtagtgttggactttaacttgtcatgcagtcttatccagttagttccagccttatagctacttcttgttcatcggtgcagtactttgccttagacttccttcagattccacctcacagtggacacccttgtcctcagctcatggttccgactactacggcccatagcggactctcaccgcctagctaatacccatgccgggcgcacatgttaagagggtgaggaaaaacttttccgtttttcctcaccctctttacttttatcgcctatttttgatccattaaataatcatatagcatctcatgcttaatcttatcagtgttgtatcctaatacctctgcaatctgataagcaaaggctaaggcagttgcaggtccacgactggtaatgatttttccatcattatcaacaaccgtaatatcctctttaaaatttgctgttggggcaaccttagcaatttcctcgttaattcccgggaagcaagtatagttatgattatcaagcaacccataccgagccaaggcaatcggagcagcacacattgcggcatcccacttattttctgcattgcgtttttgcatcaatttcatcaacttatcattatcgcgaagcttttgggcaccccgcgaccaccaggaaaggccaccacatcataattgaggagccgatcactcattacctcatcacaagttaattcaattccatgagcgccaggaacatgaagatcctctaatccgaccattgtggtttcaatcctcattcgccggagaacgtccacaattgtaagtccttcaacttcttcacaacctggtgcaaacactacagcaactttagccaaaatatcaccccatcaattattaattgttgcaactacccgtttcattacaccctttgcttctggaatttgataaagcgggtaaatatgaaacagtccacgaccagtatatgagtttacagtgatcccagcgttacgcaatttttgaacaaacaaggtcacatcaggatatagtatttcccttgtccctacaaaaacagtcacatcgcgcaactgatcaagattcccatataagggacttaagcgatagtcttgatgatctgtatcaccggcccacatcgtaccaatttttcgtaaaccgttcactgctagtgtaacatctttatcctcatatttgctaatgaggggatttgtgaggtcaaggtcaagccaaggagaaaatagaatgaggtgaccaggctgtggaagcccctttttaccaagatattcacaaaagccagctgctaatcctccgccagctgaatcgcccataatagttactttactagcaggcataagggtataaattttactataaagactagcaatttcttgataggcggtacggaaagtagcatgcggaactaacgaataaatcgggacataaatcttcgcatccgtggcgattgccaaccgatttaaatattgccaatgagtcttatcgggacgctgaatataggctcccccggttagatacatgattactcgttgattatctccgtgatcatttaagacatatgttgttacttcctgttcttgacgctgaacatcaaccgtcatctcagcagcaggtaagtagtaatcagcttcattgtcaatccatgcattacccactaaggcattaaatttattattttctgcaagatcatttttaaacccgcttaattgaattcccatttcagtaaaggttgctttactagaacgatgagcaccacatcgccgtaactctcgcaaactattctcaagattattagccaaatgactagcaatttgagtattaaatttttttattttctccactgaaacgatcgctcctcatttaaaatcttactattatcctatcatgatttaagattttgtgtctttaagattacctaaagccattagctcgcgttgatgacaatggttttgccagcctaaaactacaactaaaattaaggcaataacgattaaaattactgccgcaatgataatgtcgcgatacccattataaagaatcatacgcagggttggtaaaagcttatctggaagactactagcagtttgggcatttgataatttatttagcattcttaaggtaattccgtggtgcgtttgaacaccctggaatagctcttggttaagaataactccatacaccgcggacataagggtctgactcaaaattcgcaataagtatcctagcgaagtagcaattggtacatcccgtaattcagcatctgtttgaacattaatctgtaaaatattaaagacaagaccaacaccgaatccttcaaaagcacccatgaataaaataagccagaatggtgttttttgccccccaatcattattcctaaataagcaataaaaattgaggctgccccacaggtaacaatccagtattttccccatcgctcctgcaataccggtactaattctgaaccaataaagttagtaaccgcacctggaatttgcgtcattccgccaagcagcgcacttaaacctaaaattccctgagcccacattggaatataagtgacaaatgcaataaatgaaccccagattataacgaataaagtaaaatcaattaccaattcgcgatttttaaacagacggctaggaacgattgggtcgaccgccttactgtcaacttttatcattccgccaagcaataagagaccaacaactaataaacagcccactactaagccagaagctgaaccaatcaattgaacagctactaaaattattactaaactgactaccagtaaagttgctccaagataatcaactggcttacctgcagcttgctttttcacattcttatagaacaagctaatgatcgtaatcgcaattaaggcaatcggtacattaacatagaaaacccagtgccaactcaacgcgtcaacaatccatccaccgagtagaggaccaataatcgaagcagttccaaaacaagcactggcaattcctaatacttgggctcgtttttttaggttgtcgtacaattcagcaaaaacgataaacgggattgtattcattccgccagcaccaattcccattacagttcgcgcaataataaaccataaaatattaggggctaatccttgaaagatggctccgactaaaaacatggaggtagcagtaatataggcttgcttatttcccttatgctcaccaaacttactccataatggggttgcaacagccattcccaaaagaaaagttgcgatgatccaccccatatattgcaacccatgaaggtcactggtaatagctggcaaggccgtatttacaatcgtaccatccatccccgccatgatgttagatagtaacaacgcaccagtaacaattgttcgtcgttgttgtaattccactttttcatctcccttaattctctacgtactaaagaggatggaacagagcatcaaagtgcgttgtcccatcctcttgaattacaaactgtttcccattatacgacctttgtcacaaaaagtataatggttattttttcattttcttaatgtcctgccctaactgttgccagtcagctttaatagtaggctccaatcggcgggcatagagtactgcggccggatgatacatcggcataatccaatgcttatcagtcgtcaactcataaccatcatgcgcatcattagtccgttgaatcttttcgtggagaagttgcccatgaagcttaccaatattggcctgactaccaagcagccgttgtaaagccgtattgccaagcgtaacaataattttcggcttaacttgagccagttcccaatcaaacaaaggagcaaatgctaagacttcttttttagttggcgtccggttaggccgtttttcaattacttcacctgtcttcttatcaattgccttcttaatactataaggccgttgacgaactacactagtaatataaacggttgaacgcgagtatccaattgattcaatcaatttcatcagttcctgaccggaagcaccagaaaaaggaatatttaccttttcttcgtaacgaccaggagcctctcctactaacatcaaatctggattaagcggtccttgacctggagtaaaacctgttaattgccgatccttcgtttttccttttacctctgccagtagcgttggcggatattctgcaatcatgttcgtaatctcctatccattatgtcgccacttagaatctgtaagaatacgagcagcgatcaatcccattggcaagaatacaacaatcataagcgccttggtcatccaaagcgttcctacactaatcgaagttaaaccgatattatacattgcccgatacatatagagtcccgggaccataataacaatcgacggaaccgtgattgaaatttgtggatattggattttacgtttaacaatcgatgccaataacccggcaactaacgcccctaaaaatgcggctgcccctgccggtattccggtcaagtccgttaattctaagcgtaaagtattagcaatcgccccaatacaaccggcaatagccgccattttaggcgtactgttaaacattattgagaagccaaacaccccacaaaagctggctggcaaccggagtaaaaagagcattaatgcagatagcggcaatgcttgaaaattctcaggacgcaggttaaccattaatgctacaatccacccgaccaaggtagcaactgtaataattgcgattgcataggtcatccgttcaagcccggaccgcatatcaagttttgaaatatcaaggccactagtaataaatggaaatcctggaataataaacagcattgcgccgatataccctgcttcatgacgcgaactcacattaaacgttaattgcatcaaacttaaagccaacaggtaagaaaggcacgcaactgcaaccgcaaccgctactcccgcaaataaggtaatgtgatggtcaatcatcttacgacggacatagtttccgaggccagccccgataaaactacaaaacatttcaactggtccaccaccgagtaaaaagacgaaggcgctacatgccagagcggctgctaatcctacttggtaaggagcgtaattcccttttgagtgggcaatttcctccaaacgggagtgaatttctccaattgtcatctcactcccatgctggtcaaattctttaataaatcgttccatctgcgaaagttttgtcgtatttacacttgtgcttggcaaagatattgcctgcgtatagctatgatgggcatccatacaggtatactcgagggaaactaacccaatatcgaccgaacaagtcatttttagcgtccgggcaactgtattcattgaatcacggactcgccatgcccctgttccataagaaagcatcattaatccaattcgcccgacaatcgctgctcgttctactaaattagcctcatacgcaggggtgaaattatcatttgtaaaaaagtcatgccatggaatcgccatatgatgcttatcagacaaatgttcagtcggctcaaaatcattcgctgagatctctttatccttactcaaaacccatcaagctcctcttatcaattctcttaactatttaattatacggcgactgtcaagcgacgggagtaatttcttttaatttagtgattagttgctgctcatcatcgcttaaaatgtaatcctcccgtgtagcaagcgaaataaaaaatttttccggaattgggtctttaatatcgagggcgacaattcctggttcatcctttaccgcatctttaaccatcaaactaattcccttattttgccgtaccaactctttaatccaggaaacatttggcaccttataaattgccgtttgtggattaatttgggcataggtagaataggtctgaaaggcagctttatgcacatattgttggtcataattaataaagatttcgttagttaagtcttgaaaactaaccgcctttttctttgcaagcggatgatcagcacttacgatgatactaaatggtcgcgtagttattaattccgcaaaaatacctgcttgatcaattggtgcaattgagcccaacattgcaatatcgatctttcccgcttgtaattcacttagcaattcatgagatcccacagaaacgatttttattcgttggagaagctgcttagaaagattgccaataatgtgtgaaatatacatttttccaatgattggcggaagaccgaattttatttggcgttgatcggaccgtgctatttcttgatgagcaatgtctatttttttgtttatcgccaacgctttttcatataataactgcccactgcgcgtaatcatttcatccctatgaacacgatctttgcgcactaattttgtgtcaaattcttgctcaaggcgacgaattgcctgggtaatactaggttgagaaacattaaaatactttgctacttgcgtataattttttaatttaactagcatggcaaagtattgtaaatcacgagtattcatcgtcttaaccctttctatgtcgaaataatatctttatcttacgtcaatttatacttgaatacaaaagaatgttcgcaaaagaaatcaatcttttcaacaagacggtcggctaaactatcttcatgttatcttgttatttaaaataataaggctggggaatttttcatttctcccagcttccgcactaatcttaagctattcaagtaaatattaaattattgatgttcttttaagtaattgtccattattttattaaatttgtttgcctgttctgccattattacatgaccactttgatcaacagcttgatgcgagataaactgtggattagcttgtctcataacatccgcaaatttaccattaaaatatggactttgatttgcggtaactaataatgttggaatattaattttttcaagtgttaatcgccaatcccgtttagcgtgatcatagagtaagggaagattttcggccctaataaatggaaacatttctttttctggctctaattttgatattacttgagatggtaccccatttaatgtctctctaacattaccatgctctttcaattttaatttatacgatgcccttgtgatatccatatatccataaggccattgaaccgtattaaacatctttggagattgatcaattgctattacaccacttaacggaaaatcagtataatatgataaaaatccatatattacagatgctcccatagaatgccctattagaaaaggttttgttacattcaaatgatttaatagttcatacaaatcctttattaaaggctcaatagaatctaactgctcatctctagttgatgctccatgatttcgctgatcatacgtaattacttgataaccttgctgaattaagtttttaatttgtaaacaccatatttgttgatagccgccaaagccatgaattaaaacaactggtttcccagtaccataaacatagtaattaattcttatcccatcacttgttttgaagtccatcaggtaaaccttccttcactaaagctaaaaagatagtaactattaataaatcagcagtacctccaaggcttaaattttgctgagtaaatttttcttcaatttcagttaatttttgttgcccagctttagtccttattccaccaagatttaaacactctttaatttctttatttttccattcttgaatagccggatcccccgctcttttaattaaggtcgaatcttcaatatgtaaagctaattctaaaaaagttattaaaattcgactattccaatcatagtttgatgttaataaggtcggtaacccatacttaaaaaccgtcgggtatccagcgtgtgcttctcctcgaataccagaaaggccgtattttaaatattgtttctcacccgcagttagaatttttttcgatgaaagatgttttagatcatcattaatcaaattttttaacatctttttaatcacgtttttaatatcatttgcatcaaatcgttttagatgctgtaagctgtaggctgttgctgtaacaaatactcccaatgaaaaaactgctcctttatgagtattaacattatttgtagcaacaaacattgttttctcagcttttttaccatattcacgtaacttttcaaatatcaatgataaattagcagaacgactcattattcccagtaatgctgcttgatgaagatagttacgcaaactaatagaactattaataaacgtaaatatgtccatatctaagtgtgctccatgttcaactggatccactaatccgggcttaggccaagcagatacttcatataaaagagctcgctgtgcaagttgagttaaccaatttgcaatgttttctttttcttgatataccaattctacgcaaactagctgactaactttttcttgtaactcttcaaccgaatgtcgacgggagcgaccacattctttagctgggcgaccacaaattaaacactttctagcaggttgatttacatctgaccttgatagtgattttattgttccactatcattagccagcacatctaagtcaaataaacgataacttggcttcaattcttcaaaatgacttgtaatctcttttactaaaattgctcctgtatcaacaagatagaagcgttctggaccggttttcttatccagccactctttttttgaaataaaaacaattccagcatctaataacattttttcaaattcattgagaccagctataaaaaatgactctatctttttattattctttattggaccaggaatatttaatttagctgctacaacagtcattgatggattagttttcaataactggttttgtatttttacacgctcatccttattttttaaaacggcaagaatgtcttggtattcaccgtgatcaaaaatagtttgcatactaactcctcaaatcaaactttaacattaattatagcaataatgggtataaaaaacggtactagaaaattccagtaccgcaatttctattcgtaattagtccttaatttgtttaatttcatcaattaaagtaccatcacgatattcaacaagtgcaactgttcgatcagtatattcaatcttttctggcttaccaacaatcttttctgcacgttgttgtaattcttcaattgaaatcaatggaatacttggcacattcttgaatgcttcaattaaatctttacgtgcaggatttacagcaacccctacttcagtaacaacaacatcaattgatgaacctggggtagttactgaattaacagctggtacaattgttgcaatccgaccacgagttaatggtgcagaaataattgtcatctttgcagtaccagcatcttggtgtccaccaacagcaccacgaatttcaccattagatccagttaaaacattaacattgaaatcagtatcgatttccaaagcagaaagaattgcaatgtccagttgatcaaccattgctcccttgttatcaggatcagcataccatgatccgtcaatttcaatttgaccaggattactcttcatacttgaagcagcacccttgtcaaaatcttgaacatccataactttctttactaatccctcttctaaaagtttaacgattggcgaagtagttcccccacaagtaaaggaagcagtaatgttgttatcaatcattgcttgacgaaggaaacgggtaacagctaaagcagctccaccagtaccagtttggaatgagaaaccttctttaaagtatggagaatttacaattacatcattaaccatctttgcaatcttcaattctttaggatccttagtgaaacgtgttgcaccactaccaatacggtctggatccccaactttatcaacttttacaacgtaatctacttgtgtttgttggattgatgcaggcgtattaggataatcagcaattgtatctgttacaagaacaactttatctgcgtacttggcatcaactaatgcataacctaatgatcccaaagctgattcaccattcataccattagcatttcccattcgatctgagttaggaacaccaataaaggccacatcaattttaatgtttccattttcaattgaacgtgcacgattaccatgtgaacggaaaataaccggattctttaataaaccgtgagaaacggcttctccaagacttccacgcataccagaactagtaatgttagtaattgtaccagccttaatagcttcgattaccttatcattcattaccccagttaacgatgatggagccaaggttaagtctttgtaacccatcttgatgattttatccataaccatgttaaatacaaagtcaccattacggaagtggtggtggaacgaaattgtcatcccgtccttcaagttattcttgataacatcatctaatgaatctactaacttatcgtcacccttggtaacacgaacatcatgaccagtatagtgaacaattggatgaccaatttcagtagtttcaaatggcttgtagtttgttgaatctaaaattttatctgaaatttcgcgtccgactttatttttcaatgtattcgccctcctcattgatcaagttagaagcctttgctaaacgaattacccgttgtgcacgtaatacaactgggcggtcaaccatttgaccgttcattgagataacacctgaacccttttggtgtgcttcttcaattgcagcttcaacgtccaatgcattttcaatttctttcttggttggttcataaatcttatttacccaatcaatttgacgagggttaacaagagatttaccgtcaaatcctaattcgtgaatgtgttcagtctcacgtttaaagccttctacatcattcatattagtaaagacagtatcaaaggctgcaatgccagcggcacgtgctgcgtgaagaatcatgttacgagcaaattcgagttctgctccatctgggtaacgatgagtcttcatatcagtcgtatagtcttcagcagaaagtgccaaaccaatcatccggtcagtacttgcagcaatttctggtgcattaagtactcccttagcactttcaatagctgccataacatgcgttgttcctggcttaataccaaatttgttttcagcttcttctactacttttacaagatctagcatcatttgagctgattctacttttggcaaacgaacaacttgaataccagcttttaccattgcgaaaacatcattcttaaaaaatggtgtatcaattccattaacacgaacaactaattctgaatcaccataatcttgtgtttgaagagcttgataaactaacatccgggcagcatctttttctgccattgaaaccgaatcttccaagtcaaacataatggagtcggcaccataaataccagcatcctttaccattccggcattgttacctggaacaaacatcattgtccgacgtaaacgttcttccattattaaaatacctcccagtctggttgatctgctgtatcaagagcacgttgagcagcagccattgtccgtgctttaattacacaatctaaagctcctttatccacagctttaacattggcattatcaattccataagcagttaaagtatcagtaatcaccttacgaatttgattaccataaagttcttccacagaggaatctaagtcaatgttgataccattattaccttggctcaaagtaatttgaatatcggaagattccaaagttcctgctaatgcagtcttcttaatatccattatttaatacttccttcctttatccgagtttgaagctcagaccagttgtttttaataaattcgagcgttgtatctggaacatacttttttactaactcaatattatcattagcaattgctgctcgtaccttcgttgctgaaataatatcctgatccttgtttttctttcgatcaataatctttacttcaacatcaggtggtagaaccctatttaactcttcattatatatatttgttgttttggaatatggttcattcccaagatatcgagatgttatattaagtggttttgcaatttgttccttaaaaagggttgcatccaaggaagcttgaaatcttccaacattttgatcatcttttaaaaagtatgctggaaacgtagcataactaaccatgtattccttacctggtactactataacatttggtaaatcagccactccagctttaactaatttaaagcgttcagaaaatgaaaaaatagaaacatcttcactaacaacgaaaacatacacatgatcattttctttactagcagtttcaactaggtaacgatgtccgtttgtaaaaggattggcattcataactattcctgcaatcttactttccttttgatcattaaagttcggtaaagaagaaatatagtcatgaatatcaggagtaccactttctaatacagttccttgttttacttttgctaattcatgaaatccaacatactggaaactttgactatattgtggtttcgtaaaaacaaacaaatgaaagcgccccatcattgcagcttcgttttctaatttactaaccaaactgttaaatgtttcaccatgtccctgaacttttgaacaaattgcaatatacttcaatacattaccagcaattgatccagttgctaaaatctcaccattttcttcccatacaaaagtcttatcaatagaagatgtttctttttcagaaaaaacttcaattccattgaaccgcaagaacttttgccacttggtcaaattgcgttttaaatgaatgttaatttcacgaacttccattaatattctcctaatcgttattcttttgacttgcataatgttgaacagctttagctactgtatttactacaccatcatcaaatactccaggaacaattttttcagctgttggattagaaatcatatttgctaatgcagaagcaattgctttttcaaggccgaaatcgactttatttaaatcagctgataataatcctttatataacccgggaaataccaaaatattatttacttgatttgggtattgacttgagccagttgccattactgctgcatctgcatcttttgcaatttgaggatcaatctcaggctttggatttgcaagtgcaaaaataattggattcttagccattgtctttacttgttcacttgttaaaacatctgcatcagaaagaccgataaaaacatcccgatcctttaccgcttcacttaaattcttataaggagtttgatcagcactttgttttactaaatctgtttgataatgattataattttgactatcaacatgcactggtccatcaatatcaacaaatgtaatatttttaatacctgccgcaaaaagtaatcgagctgttgcaactcctgacgctccaactccattaattatgactttcaaatctttcagatttttctttactactctagcagcattaattaatccagccaaaacaacaattgctgttccttcttgatcatcatgataaactggaatattaactactttagacaatttctcttcgatttcaaaacaacgaggtgctttaatatcttctaaatgaaaacccgcaaaagattcctgcatattctttaatgttgctacaaattcattaacaggaacttgctcaacagttaaaggtagtgcattaacattagccaaatccttataaagtaatgctttcccctcaacaactggaagaccaccggctgggccaatgtttcctaatcccaaaacagcagagccatctgttactaatgctacaagttttccactaagagtatatttatcctttagttcgggataacgttctataagcttagagattatcgcaactcctggagtatacgcttcacctaattcttttcgatttttcacttcaaattgaggtgcaatattaagtactccttggttcttagcatgcattgagagtatttctttatcttccatttatcgaaagcctcctcatttcattattaatatcttaccacctttttaaaaaaattaaaataattactgtattttttaaatatttaaaaaataatgatatacttaaaacaacattgagcatgaaaggaataaaaataatgaactcacagcatcaacaattactcggtaaccttgcacaagattattaccttagcaaaatggcaattagtgatatttctaaaaaatataatcttagtcgctacctcattatgaaataccttgatgaagcattttcaagcgggattgttgatataagcattcatacagattatgaccgaaatgcccaactagaacgcgaattatcaaatagttttgatataaaaaatgtctatgttattaaagatccaagcaaccccttggaccgcgataaaatcattgctaactttgcagctaatcagatccaatctcttattaaagaatataaaataatcggattatcgtggggggaaacaatttatactattcttgatcatttcagcaaacactcttcccgcaatttagttttcacacaatttatgggtgaaaatatgaaatataaatcttctgccgcatcaatgcgaatggtacaaaaagctgcatccaaatatgattgtccttattacaccattcccggaccactttatattcttaatgacgaagcaagaaatgacctatattccgaaccggcttttacagaagcatttaaggttgccaataaaatggaaatgattgtttgtggattaggcactctccaatcaatagacagtatccctgcttggcatgattataaaaagaggttatttaaaggagttagtttaaaccaaattgctggaatggcatttggtcgtccatatgatattaacggtaactttctaattcatcccactaacgataaaactctctctatccctttaaataaaattcttaacgttcctatacgctttgctattgttcaacgcaaatcaaaatatcaagccgctttaggagcccttcgtggaggtttatttactgatatgatacttacagaatcaatcgctttacgaattattgaagagttaagataaaataaaaatccgaattcccgttacgagaattcggattttttatttacttcttctaccaaatgccaattaggcgcatccagaaggttccaataataccgtaaacaagtaagtagaagatacctaatataaagttcatcttccaccattcgctctgagtaacgtaaccagatgatgataaaatcgaagctggtccgttagcatagtgagtagtagaacccatgatagcagaagtgaaggcaaggagcattgcagttaacattgctggtgctccagcagcaatcgctacagaaacgaaagccgtgtacattgcagtaacgtgagcagtagcactggcaaagaaatagtgagcgtagaagtagacaactactaatacaactaatacccaaatccagctaactccgtgaagggcaccttcaatactgttagagaaccatttaatgaagcctaacttagtcaattcactagccatgaatactaagattgaaagccaaatcaatacattccaagcaccagattcgttcaagacgtccttagtttccaacacgccagtaataagcagaagagcaattgctaagaaagccacaaaagtcgcgttaatagcaggaataaaactagtcaacatccataaaacaagagtcaataagaaaataagccccatgagcttttcagaaagcttcatgctacccatcttttcaagttcgctattagcccaagtcttagcgtttggtgtttctttgatttctggtgggtacatcttgtagataatgtatggcacagcaattaaacaaagtacactaggaagaactccggctacaaaccatccaacccaagtaatattaatgtttaatgtcttagctaaggcaactacaaccaagtttggtgccatagccgtcatgaaggttgcggaagtaatcaaattactgtggaattcagtgaaaactaggaaagaacctatctttttccgagtacctttctttgggtcagacccataagtttcagctaaggacttaataattggataaactaccccaccagcccgggcagtattacttggaatggctggtgaagtaaccaaatcaattcccataatggagtatgctaaccccaaactatgttgcccaaaactacgaacaaagaccaaagcaattcgccgacctaatcccgttttaataaaaccacgggaaagtaggaaggccattgcaatcagccatgatgacgaattttcaaaggcctttaatgcctcttccatcggtacaatgccaaccaagaccataattgtgaacccaactaaagtcgttccggcaatcggtaacggctgggtgatacatcccacaatcgttgctacgaaaatagcaaacatatgccaagcagccatagaaacgccatcaggacggatcggaccgcagaaccataagattaagccaacagcaacgggccatgcccatgccttagctttaaatttagctaatcccattatattaaaccctctttcaattaattcttaataaccacaccatctaagacatctttcatcttagcagcagagtattttagtttttcgatttctgtatccgaaagtccgtaatcaacgactttttctattcctgttcgattaacaattgcaggtattccaagatacaaatcattaataccatattgtcccattaaaggggctgatattgggagcatgatattacgattttcaataatcgcttttacaatataagcaagatatttagctactccatagaaagtagctccttttccttcgataatcttaccaccacgttctttaactgctttttcaagttcgctatagtcctgagcagttaaatcagtaacttcttttaacggttttccattaatagtggcttcatcgaatgcaccaaacgatgtatctccatgttcccctaaaactaaagcatcaatttcatttactggaacatttaacttttcagataaaagtacattcaatcgagccgtgtctaatgaagtaccagttccgataacacgatgcttagggaatccagagagttgttgtgtcactgtagttaaaatatcaacaggattacttgatacaacaaaaataccgttgaatccactttcaacaattgggttaacaatagttgaaagaatctttgtgttccttgaaacaagatccaaacgagtctctcctggcttgcgtggaactccagcagtaataactacaacatcagcatcagcagcatcagaataatcccccgcatgaatgttgactggactagttagtggagtaatatcttgtaaatccaatgattctcctgttgccttctctttctttaggtcaacaataactaattcatcaatttcttgtgttgtttgaaggagtgagaatacgaatgatgatcctacagctccatcaccaacaagcacaactttatgatgatatcctaacataaaattttcctccaaataatatacaaataattgctctaggcagtttctcactgcccattatttttttactttaagccacgggcgtaaacagttacttgttgacctgcttgacgtccaaagacaattgtttctgcaattgagttaccaccaacacggttattaccatgtaaaccaccagcaacttcacctgcagcatataatcccttgattacatccccattaccatcaagcacttgagtctttgtattaatatgaataccacccatagtgtagtgaattgcaggtgcaatatggattgcaaagaatcctggcttagtaattccacgatccattcctgttgtccgatggaattctttatcgtcatgattttcaacagcttcattccatgttgcaactgtcttctttaagttctcagtatccatgttgaggttctttgcaagatcctcaatcgtatcgccatgaacaacaagaccaactttatcgtaaaattcaattgccttagcatggtcacgaataccttggtcaaaaattaagtaagcactgtgttctggaagggaagtaattgcattagaaacaatctttcgagtgtttaattcgttaacaaaccgattaccttcagcattaactaagattgcaccttcaccacggacagcctcaccaataaggtaaacatgaggattatcttgttgaacagttgggtgaacttgtacaagatccatttgcattaattcaccgccaacgccttcagcaagcttcaagccatcaccagttgctcctggttgattggtagtcttgtaatcagcaaggtcagggcggaaccgcttcatgtattccttagaagcaccaaatccaccagtagctaagataacagcctttgcgtggatggttttaattaggccatcagcattagcttcaacaccgattaccttaccctcatcatcttgtaagagcttgttaactttaaccttattaaatactggaatgttttccttttgaacaacttccaataaactttttactaagaaaccaccaattggcgccatacttgctggacggtgagtacgcttacaagacattccaccagtaattgtaatgtcatcaagcttaatcccatgatcagctaaccagtcgattgctggagctgtgtgatatacaaagtaacctagcatatccttgtcgtttagacgtccaccatcttggtatgtttcgtggtagaaatcggcaacgttatcaattactccatgttgtaattgcacattggtttcagcggcgttcattcctgaagaagcccggttagtatttccaccaagttcttcttccttttcaagaacgaccgtcttcattcccaattcgtttgcttgaattgctgcggaaagacctgttccaccagaaccaattacaataacatcgtaatcattatctaatttacttacagataatggttggaatttttcagccatgatattgctctccttttaattatatttaaatgtattaacagtcaaaaagagtggaacaagttctttttattgcttatttccactcttgccaaaattggcattacttttaactcaattcttatttatcacgatcaacgttggtcatcttaagcatgtccatccattcatcgtattgttcttccgtaagcttaccagacttcaaagcagcttcttttaatgtgctaccagctttatcagcagcttgagcaatcttagcactgtcatggtaaccaatgtgtggtgacaaagcagtaacagtcatcaatgaattatcaactaattcttccatccgcttttcattaactgtcattccgtggatcatcttgtcagcaaatccagtaattgttccagttaataagtcagctgattcgaggaatgcatcgattaatactggcttgtaaacattcatttcgaagttaccttgtgatgaagccattgttactacagtatcgttaccgaatacccgtaaagcagccattgttacagcttctgcttgagttgggttaaccttacctggcatgattgatgaacctggttcgttagctgggatatttaattcgccgtaaccagcacgcggaccagaagctaagaaacgaatatcttgagcaagcttgaacatgtcagctgctaatgtcttcaaagcaccgtgaacaacatctaaaccagagtggttagctaaaccgtagaacttgtttgaatcagcagtcaagtttaagccgtaaacttcgctaagcttttcagcaatcttttcaggcattccttctgcagcattcaaaccagtaccaacagcagtaccaccaattgccaattcatctaatgttgattccaaagtcttaatgtaatcaaggtcatgttctaaggaagcaatgtaaccagaaagttcttgaccaaatgtcaatggaacagcatcttgcaagtgagtacgtccaactttaacagtcttcatgtacttctcttccttaacctttaattcatcaattaaatgttgaacagctggcttcaacttatcaagcgcttctaaagcaactacattcatagcagttggaaatgtatcgtttgaactttgacccttgttaacatcatcatttggtaagatttcaatgtcagggttaatttcatgagccttgtgcgcaacaacttcattagtattcatgttggtttgggtaccagaaccagtttggtaaacctttaatgggaagtccttccgcaattcttcatcacttaatgcgagtaattcatcaatcgccttaacgattaaattacccttttcttcagagatagctttagtttccatattagcttgagccgctgcctttttaatgttcaataaagcacggataattgctaatggcatgtattgaccggttgggaagttattccgactccgttctgtttgtggtccccataatgcttcagcagggattttaacaggacctaacgtatcttcttcagtacggtattctgacatctcaaaaacctccaatatattaattgagcaattttgtcttgtgaaatgttacacatcatttacacgtatatcctaccttgtaagtaaagctatagtcaaatctttaattttcaataaatttcacttatagctattgccttgccaactgttataatagcttttttcaattacgtttgcaaaagtttcacaaacttcgatacaaaaaaacacctaagattttttaatttcttagatgcttttctatttttgtctaataatctggttttattattcacaaagatgaaagctgcttgattaatattgaggcttccaaattttttctgctactacgctcttcgcatcagtaattccgtcgccggctaggccttgatcgatagcagattcagctactcgttcagccactcgcttagaaaattctgttaacttagaaacaggaggtaatacagctgctcctggtttttctgggtcaactaagccacttaaagcatgagcagctgcagcaagcatattatcatttaacactttagcttcagcagccaaggcgccaaaaccaactccaggataaattaacgcattgttagcttgcccaatttgataaacggttccattatactcgatatctttaaccggaattcccgtcgcaattaatgcctttccatcagtccatttgagaaggtcggctgcttttgcctctgctaacttagttgggttagagagtgggaagataacaggccgtagagtatgggctgccatttcctttacaaccgcttcatcaaaacttcctggctgagtggacgtaccaatcattactgttggatgaacagccttaacaactgcaagtaaattagttaattcatcagcattagcaaattcgcttcgttgacgggtaaatggcttttgctttggtgttaagccgggcgtatcgtcaaacaataatccttgcttgtcaacaaggtagaagtgcttctttgcttcttcgggtgtcaggccttgacggatcaattcgtcataaagcatcttagcgattcccattccagcagtacccgcaccaaatgttaagaatgtttgatccgttaacttttcttttgagatattcatggctcctagcacaccagctaaggcaataattccggttccttgaatatcatcattaaaggtcaaaattttatcctggtacttatcaagaatccgtgcagccgttccccgaccaaaatcttcaaagtgtaataaactcttagggaacaatccttcaactgcatcaacaaacttatcgatgaagtcaaagtaaggttgtccttcaacccgcttcatccgattgccaagatagtgcggatccttaagtaatttttcattattcgtcccagcatcaatagaaaccgggagcacttgggatggatcaatcccagccgctgctgtgtaaaccattaatttcccaacagaaatgtcaaccccatttacaccccagtcaccaataccaaggattccttcagcatctgtaacaacgataaggcgaatatcacgaccatcagcggcatcagcaagttcctctttaattaagtcaggatgctcaatgctcaaatatgcagcatcttgcggcttaatgtaacgttcattatattgctcaatcgcctcagcaattacgggatcatacacaactggcataaattccgcaatatgtttttccattaagtagaagaaaagcgtacggttagtattgaatacttccatcaataggtgacgttgttcaatccgtgagttcttagattgatataaccggtagatttcgtctgcctgttcctcaatcgttcttacacaagatggtaacaagcctaataaaccatacttttttcgttcttcaattgtaaaagcagttcccttattcttaaagggatcatttaatatttgcattcctttacgcaacattatcgcctatcctttaccttttttctgtttcaacattcttagagtaattccagcgctagtttatagtcaaatatatgctatgatataaataaaattgataataccccttataatcactgatagagaggcatttactatgaaattaaacggcctaaaatattatcaagcactggtaaaatataaaaatttttcgcaagttgcagcaaaattcaatgtcagtcaacctactattacaatggctatccaacgactagaaaaagattttgggacgtcattttttgttcgtgaccatgtccataaacaattgcatatcacgccgactggtaagcaattcgccattcacgttgacgttattttaaacgaattaaagattgctcaccaagaaatcaatcaagctgaatcatccagtattcgctttgggctgccacctattatcggcaattactactttccgccattaaccccgctattaatgcgagaaggccttttaagccacttggaaacctctgagcatggttctaaggaaattctcaagatgcttaaacacggtcaccttgatttggcattgcttggatcgcttaaccccctaaaggaagtggggctaaaaactactgaactggctgagtatccctttaagattattgttagcaagcgtcatcccctcgctgctaaaaaggagattgattttgctacgcttaaaaatgaacgctttattgttcctgatactgaattctttcatgagcaagcttttaagcaaatttctcatttagctcattttcgtccccaagtcatctaccgaaccgctgacattcacgttatcaaaaccatggttgcagaaaatcttggaattgcttatttaacaagtttggcgattaccccagaagataatatccattccataaatgttactagcccgttaaaacaatcgttccgtctgtcagctgttactcgttcaactgaattattaacagctcccaagcaaaaactatgggatctcttaactacaaaaaaggaatgacaaataaccgtctaatacggtggctatttgtcattcctttttattatttctctttttcaatcttaattgtcttaataataacgtctttttcaggcttatccatcgcatctcgcttaactttgctgatcttttcgacaacatccattccggataatacttggccaaatacggtgtgatggaagtcaagccacggtgtaccaccatgtttttcgtaataatcaataatctcctgcgggtatccaacagccttcatttgatcaatcatattttctggaacatgttcattagtgacaataaagaattgactgccatttgtgttcggaccagcattagccattgacagagcaccagtgaagttaaataattcttcagaaaattcgtcttcaaatgggtgaccataaatactttcgccaccacgtccggttccagttgggtcaccaccttgaatcataaaatcaggaataacccggtgaaaaattacatcgtcataataatttttctctgctaatttaacaaagttttcaaccgttttaggtgcgtactttggaaaaagttgggccgtaattgttcccattgtagtttcaattactgcttttggtcctttaacctcatccaatgataattggggatatttcataaaaaagcctcctcttttctcttctaaacctctctaactatcttagcaggaatatgaaggaaaagacaattattagtcctcactaacacgtaatacacaagctcccttaatatcgccatgtttaacatagcgtaatgcttcatcagcctttgctagtggatattcgtgtacttcaggatggatattgagacggtcagctaatgttaagaattcttccccatcacgacgggtattgctctcaacactcgttaatgtcttttcgtggaatatttctttttggtaattcatcattggaatatcagtcatatgaatgccagctaaggccaaagtcccgcctggaactagactagctaaggccggtaataccatatcaccaactggcgcaaagatgattgacgaatccaaaggaaccggcgcagggtcataggatccttgaacagaagcacaacccaattccagggcgaatttctttgcatcctcaccacgcgtaaagacatgcacttcaattccctgtgcaagtgcaatctgggccgtaatgtgcgctgagccaccaaagccatatagccctaggcggccaccagcgggaacattggcacgttcaaaagcccgataaccaataatccctgcacataataatggagctgcctctagggaatcaaacttttccggaagccgatatgaaaatccttctggaaccgtgacatattctgcataaccaccatcatgatcccaaccggtataaagtgaatgaggacagagattctcatgacccgagcgacaaaacttgcataccccacaagcatgccggaaccatggaatcccaattcgctccccaagcttaaatcgttgtgtttctggtccaaaaccgacaactttaccaacaatctcatgaccaggagtaacgtgttcgtggtgaaccggcaaatctccttctgtcacatgcaagtctgtatgacataccccacacgttaataccttaacaaggacttctccccgtttaggagtcggcacgggcttttcggtaaattcaattggtgatttcttaccatcaatcggcccaggagttgtgactgcccaagccttcattgttttcggaatagcattttcgcgtttttccatccttaaagacctcgattaaatatatatttcattctttattgtagtgctttttattcataagagtgccgtattttttcaatttgacgagaccattgatccttaaattttggaatgtttaacggagcattgatagctggatcatcctttgctgcttgagttaacccttctactcctccgatatcatccaagattccatttccaaaaccactaacaatttggggactgatatgagccggcaatcgtttaggctttacctcctcaaatctaattttaaagttccacatatcgccaaagtcatatattaggtcatattcatggtcaagattacaatcgcctacccaactttgggtaatatcttttgattgaccaaagccactatcaagaatcggcaactgatagtgagtatttccttgatgcagttcaaataagtgatgcccgtccgcgttaaagactgctaagcttgcaaagcacaacatatccaggcgcatatcaccgctgacggtaaatcgccgccacattttaggatgataatcacttagctcaacataaatagtatattgtttattaacatattggattgcatgctcgcgttgatttcttacttgccgctgcatatcacgaattatacgttgtaggtggtacatccgctgtttagaaccaagatcttttagcctctgactaattgcttgaacaaacaaatcgtagtcctcactagagaaaagatcttctgcccgtaaaaactttccaaattcgcgaaaggcatcacttttagaatgaaagccggtatcagtcggacgatcattatgtagtttttcatagttaattaaatagtgatagaccaaggtaatatcgtcaagaacagattcaccgagtgcctcacagtagccgatataatctgcagcacaatctaaatcttgatcaacgatgctctcgctctttccacgactttctaaataatcttgataatcatctaaaatcttttctccgaccgccgttgcattcatgatatcgttaattgaaagtgagcggtaaagatagcgacggttatgttcattaagtttagggtgagtaggcaccttaaagtccgtaactgaatagtcttcaaaaatatccattacaacatattcttcatccgttgtcttattggtaatacgtgtctgttccgctaattgaagcgcaatttcagcattggtcgggtctttttcccaatcaataattgaattaggccccatcatgaggttctgatacatctgcaattgctgttgagttactggctgaatttggcgtgtaaatactactttgctaaattgggcgtcacgaatcatcctaatttttgcatgaggaattggcgaaacttctaataaacttaagaattcacgcttaaataccgcaataaaagatcgtgagtcattaaagcgttgaggatagcgtacaataattggcaacgacattaagttattcataataatcatgaattcaccagtaacacgaattgtccaaacatttgtctctaatagatcagatggtgcaatcacctgtgaattaatatgcaaatgttgggcaagtgaatttcccactgcaataatcaccctatcaactcctcctataatttcgattatattaattttattttgaaaagcattatttatcaacttaatcaaaccatatttactgaaaattataggcagaaagcctgtgactttagtcatgggatgaatgccttccaaagcagccatgagactgctttttcttactaaaaagtctataaaatctcgtttctgcccctgcaaatttagtaatattaaagtataaaggaggtgaaaacatgaccacagttttgaaagggatcaagcttcgcttgtatcccaacaagcaacaacaagctcaactatgtcaaatgtttggcaatgaccgctttgtttggaaccagatgcttgatatggcaaaacaacgttatcaaaacaatcctagtagccagtttgttgatcaatatggcatggatgtattgttgaaacctttgaagcaggaatatccatttctaaaacgtagtgattctaccagtctccaagttgttaatcataacttatatcaggcctttcaaagattatttaagcatctgggtggttacccacgctttaaatccagacggtctgctaagcagtcctatactggtaaaagcaaaattcaaatagtggcgaaccgctatttgagattacccaaaattggctatattaaaaccagcaaaactcgccagttaactcattgtaagatcaaacgctatacggttagttacgatccgtcaggtcgttattacctgtcactacaggttgaaaccacagtacagccactatcgaagactagtcaacaggtcggcattgacgttggcgtaactaatttagctattactagtgacggccataagtatgctaaatttgacgctgtctggttaactcaacaggcgcaacattggcagtctaagtatagtcgccgccgtcatcaagccacggtgagtgtccgtcaatggaaccataaccatcaggacgtcaaagaggaactgaatgactaccagaactggcaacgggcccgaattcagaaagctcgctatcaacgacgagtcgctgatcagcggcgtgattacctgcataagctgacgatggcattggttacgcaatacgatgtgattgtcattgaagatttgaaagtcaagaatctgcaaaagaatcatcatcttgccgcggccattgccaacgctagttggcatcaattccgtaccatgctgggatacaagtgtgactggtatggtaaacagctcattactgtcaagcccaactataccagtcaaatctgtagtcattgtgactaccatagtgggtccaaaccgctcgtaattcgtgaatggacgtgtccaaagtgtggggcccatcacgatcgggatattaatgcggcagttaatattctgcataaagggttaaaagccgttggctagggactagccgtggtaaaagaacgaaattctgtaagttaggtatttggaataccaatgtaacagcctaaatactacttcgcgttcccagaaaccgccgactttagtcggtgtgtagttcataaataaaatagaagatttaaaataagacataagtattgtctctgaaaggatgcgcaacttttgatcaatcaaaatctcgatatctttgacttacgaaaaattcaaatcaataaaactaaagctgaattggaaaataatggtaaacggcagcaaaaagaagtctctagtgacatgttaggaaccttcatgccagttgatcgcgaccccgtcaagataatccagatcactgaagctaacatgatccccgagttgcttccattgcgccaccaaagaatgcttgccagtcgcttttcatttttccgtggcaccgctgaattaatggaacatgaccttaaaagacaagcccaaagcaatcttcccataattatctgtggggatgctcatgtaaacaattttggcttttacgcctcccctgaacgcaagcttctctttggccttaatgactttgatgaagcccgaatcggaaattgggaaagtgatttaaaacggttattagttagtgctgaactagcgggcgaagagaacggttttgatcgcaatgacctttaccacctccttcaattaacgactaagacctaccgccatactatcaaaagcgctaataagatgagcctttcccaactgttttatttttcatttgcctatgaagacatggggaaagcgattgagtcttttggtgatatttcaacgcaaatgcaaacagtccttaataaggttcttaaaaagagtcagcgtagcaattcagaagaaataatccaaaaaatggcaactatcaatagtcaagggcaccttgtttttcgggataacccaccacgtgcacgccatcttagcgccgtgcgttatcaacagattgttaaaggatacaataaatattgcgaaaatgttcgtcaagatgttcgggttcttctcgcaaactttcacatttccgatattatccgctatagtgtcggggttggcagttttggaacacgatgttacttaatcatgcttactggcaatgataatagtcatattgttttacaagttaaagaagctatgccattgcgttataatttactttccctccccgtacaacaagtaattagaaatgggggaatcgctggtcaaagaattgtaacagcacaacgggttctccaatcctcatccgatcgttttttaggaagtacaacttttggtggccgtagttattacattcgacagttccgggatatgaaagaatcaattaatgttaataaacttgactttgaaagttttcaattctactgccagacgtgcgcttatttgctagcgatggctcattttcaaagccccaccgcaccaatgatccgtggttatttaaagcatcagaagatattagatactcttttaccaaattgggctttaaagtatgtcgatcaagtcacagcagactatggacaattcaaattggcaatcgctaaaggaaaattaataaattaattataattaaaaaggacttgcattcatcgttttgcaagtccttctttaatactatttttcagacttttttcgctgatcacttccataacggtcttgttccttgattacactacttttacggcgatgcttattaataaaatcttgctcagcagcgaaaatcattaaaaagtcaataaaatttttactaaaattctttttaaatttgtcccatctatttttgatcattttatatacctcataaatatcattcatctttacttttattcattctagcatatctatttttgtgcaaacgattgtgtaattttaaaataaaattgtggtaaaatagaatttgtaaaagcgcttacttcaaggaggaaatattttatggaaatatctaaagtaccatttggaacctacaaagacgatccagtaacaaaatacattttaacgaacgataatggtgttcaagtaggaattcttgattttgccggtttacttcaatcttttaaggttccaacaaaagatggtggtaaggccgatatgattttgacctctgaaaacctcgacgaatttactaataatggcttttgtactaaccgcttaatcggccgggttgctggacgaattgcagatggtaagttcagtattaacggtaaagattaccaaattgaacaaaatgaaggtaaaaatgctcttcatggtggaactaatggtttttatagtcacatttggcatgttgatagcacgaaagcaactgatgattctgtttccatcactcttagtttaaccttaagtcctgaagttgatacataccctggtaagatgcatgtcactgcaacctataccttaactaatgacgacttcctttcacttaagatgtcggctacttctgatgcagatacgttgttcaaccctaccaaccacacatactggaatatggcagcagcaaatgttccaacggtggatcaattaaagctttatgtcaactccgaaaatcacttagccgttgatgatggcaagattccaaccggtgaaaaaatcgctaacgaaggaacaccatttgactttagtaccccaactacaatgggcgatgcattagaaaaaatgagttcaactaaggaaaatggctttgatgatatttgggaagttactcctagtctcacaaaaccagttgccacacttgaagatccagaaagtggtcggaagatgagtctttactccgatcgtaacggattagttatgtatacgatgaactcagatgatgcagcggtttacaatcacggacaagttcatccccatcttggtttagcaatggaagcgcagaatctttcagatgcgcctcaccatccagaatttggtgatattactttacatccgggagaagaaaaaacatacaccattaaatggcacgttgaatactaattaattactacgcaaaatgcatcgagtaggagataattgattagttcaattatcgacctctcacaccaccgtacgtacggttccgtatacggcggttcgacaacttaatcacattgaattgactggagcgtcttggacatattcataagtccgagttgttccagttttctattagttagagaatagctcaaggtcttactgtgtgcagttcgccagtagcccttgcgggtactagcgaagacatatgcatcacgctgggacagccccagcttctgtaagttagttaccttagttttaagcttcttccattgcttccagatatactgtcttattcggaccctcaaccacttgtcaaggcgttgaataaagtcagttagtttcccaattgagtagtactgaagccatccacgcatttttcgctgaatttcttcaaacattcttgtcagggatattccacgattacgtttagttaataacctcaatgctttctttactcgttgttgcgattgtttagctggacgggcgtaggctccattgtggtctacacccaacgaaaagccaagaaactttaaccgtagcgggctaccgactttggttttatctgggttcactttaactttcaatcgcttttcaagaaactgggtaatgcttcgcattactcgttctccggctcgttgacttttaacataaatgttacaatcatccgcatagcgcacaaagtggtgaccacgtctagtcaactctttgtccaactcatttagatagatgttcgccagtagtggtgacaatggccctccttgtggggttccttttccactcttagcgaaaagcccatggtctaagactccgctagttagaaacttacgaatgagtcttagtgtccatgggtcatcaatatattgttggagatacttaatcatcaagtcatgattaacgttatcaaaataggcttttaggtctaagtcgacaactcttcgataaccttgattataaagatctactacttttgcaatagcgtcgtgagccccacggtgagggcggaagccaaaactattatcagagaaaacacgctcaaagataggtgtaagaatttgggccacagcttgttgaaccattcggtccaccactgttggtattccgagttttcttactccaccattaggcttcggaatttctacccgtttgactggtgctggtttatacttgccctcacgcaaactagcgatcaactccgtcttattttctctgagatatggcagaaggtcattgactgtcatatcgtcaatgcctgctgcccctttatttctcttaactcgcaaataagcctgattaaggttattgcggtccaagactaagtcttggatagtgacactcatacctttaccttcaccataatcggtactacgcgcccttgtgtactttcggttttccaaacctatcctcgacaagcggtcagcttgttgttctgttttctgcgattgtcgcacctgattacacctccgatataagttacaagttattgtcgttcagtccttcatctgattactcagactactatgacctcggctgacttctggcttactcaacgctacatcactgcaccgcttgtttctgtggaaattaaacttattcctcttgtcggaaacgtgtaggccagatctccccgggtaaggatattaactttcgtaccatgtcaccggtagctttactgaaagtaacttcgagtagtgttggactttaacttgtcatgcagtcttatccagttagttccagccttatagctacttcttgttcatcggtgcagtactttgccttagacttccttcagattccacctcacagtggacacccttgtcctcagctcatggttccgactactacggcccatagcggactctcaccgcctagctgatacccatgccgggcgcacataaaaaagagatcgacaaattgtcgatctctttttgtgtgttaggaattataaattaatttttgtcatctaggttatacttcccagcattttgaagatttcctttgccttttcaaggtagtggtgttctgcacagaataccttgatcttgccaccttgatcatcggtaagagctgctagcttttcatcaagttccttaaattccttattaaggtccttaataacgccttcttcatcttccatgtaaacatagtgattttctgctggatctttacgaccttcactagcacgttcttcaagctttactgagtccttatctactttccaagcatgcttaaggattgacttaatatccttaattgtttcgtgttgagcagtacggtgcttctcattgtcaacactatcttcaatctttattaagtgtccttcagcatctgcaatcttctttgcaatacgatccaaagccttaagttgacgttttgcgtaatcagccataaataattacctcctaatataatagctataattcctaattcacttttattatatttttataatttaaattataaaaataacgcgtcttaaaattatagttaattttattatgaggtaatttcagcgcctaaataaatagatgattgatagaaattctcctattcaatcatctatttattaaaaaaacatcgactttttagcaacgctttggcttgtacttactggaatattaaaatcaggcagtcctggaatatgcaactcaattgagccaacttgttgattcttctttatcggtgcagttagttgtttttgatcatctccctgcactcgtaatgttggtttagttgcttgtaatttcatattctttggaagccaaacggtagtcttctttgttagcttaatattagccttattcttatttttatcattctttacttttacactagtaagcttggccgaaagatcacttacttttttgatttcaactggctggtactcatcgactaatttattataaaagtcttgttgcatcttcgactggtcattccattccccttttgtatgcaaggcaactaaaataatccggcgtcctgcaaaggttcctgttgacacaatacatttacccgcgcgatcagtatttccagtctttaagccgtcaatttccccatccttaggagcaaaaccgttttgtggcaaaagagcattcacatttgtcattaaatattgttgatctttagttacatcaaagttagcaaacttttgctttgtaatgtcgagagtttcaggataattttcaacaagatactttgagataagcgcaacatctttagcagataataagttctctgcgtctttatctacgcccttaagtttatgctttcctaagtccccgttaggcagcccgatcatattgtagatttttatatctgtaactcctgcctttttcgcaaatgccatcatctttttattaaaggctgctgtactgcccgcgtcagctaatgccaatgcttctgtacttccatcagcagatacgagcatcatcgaatcaactaactgacggactgtgtattcttccccattcattaatgggacatttgaaaagtgccaatcatccgccatcttggcaactgctggtgtaatcttaatcttttgatcccattttaaatgatggtttcgaatatcttgtaaaattactcctaaagttaagattttaattacagatgcaattggatagcgtttagttgcatttttttggtatagaacctggccactttctgcatcaatcgcataagctgctcgtgcatccatctgaaaagctgcagtatcagcatggactttttcgaacatccccaagccatttaaacagatactaattattgccgttattaataataatttggcaaaaaaagatttaacctttttcattataacaatttctctcctttacacatttaactatcatatcctattctgcctaaaaaaggtgtaacgatttggtaacaattcaaatgaaatccttatttttcattaaattaagaagatgcaccttttaacttctataaattatctgtattattaataagtatgctaattttaatcagaaagggtcggttaaaaaatgcaaagatcgcaacgtcatcgtcgtaaaccgcgcagacttatcttaattatcatcgctattctgctcattattatgggtgtccggcacttcagctcgacaagtgcccgcctaaaatccgcatggaataaaatcattttcacttccaataataatgttagtattgcggtatactcaccaaagacccaccaaatttatacttctagtaatgtaccccagcataagtttcgaactgctagtacagtaaaggttagtattctagcgggaattcttgctaagcaacaaagtcctcttacaagtcatcagaaatcgcttgctactaaaatgattgaacaaagtgacaatgattcaactagcgaattatttgaagattatcttggcggaaaaaacggtctccaacaaacttttgaaaaatttggcatgacccaatctcaggctaatagcagttgggggttaactgttactactccaaaagatcaagttaaactattaaataatattttctataagtctaaagttttatctgatgacgaaagaagtgaaattcgtgatttaatgggtaatgttgaaagtgatcaagcgtgggggatctcagcaagtagcgataattttgcattaaaaaatggttggctaaattacggtaaagatgaatggatcgtcaatagtattggctacgtaaaaaatagtaacggaacagactacacaattgcagtttatacggataaaaatcaatcaatggccgcgggacaacaagcaattgaacaacttgctcgtgtaacaaagccaatattagactaaattgaaatgataaacaaaataggggctggaagaaaacttcaaattttcttccagccccatttttataggtagtttattgagagagataaagcgttttggaaaggaatactacctattttattttgagagagattactaattaatttgatgtctatttttgttccatcactttttcaccattagctgtaatagtgaaagtcttgttagcagcatcagcatcaagaacagccacattcttgccatccttatctttccgcgtaaccttgatagttgtttcagttggtgtttccacttcaattgaaccatcaagatcaaaggctgcaaatttattccgccatgcaagtaagtctaagagattcttaactactggacgttgaacttcttgtgcaacttcttctttagtgtagtagtgacggttgatgttccgaccttccttagtcttttcaagtaattcaaggtcatttgaaccagcaagtaaaccaacatagtaaaccattggaataccaggtgcaaatacttggaatgcacgagaaagcaagtaagctttgtcatcgtcacctaatgcagagtagtaagtagagttaatttggtaaatatccaagttgttgtattcagcacttgagtatttccgcttaacgttagcaccaaccttgtataattcattggatgcatattcgatttcatcatcagttaagatatccttagcatcaacaaccccaataccatcatgagtatcaagagtagtaaattgcttcattggtgacatctttaaccacttagcaaggcggttagtcttaccagagtaaagggtataaagagtagtcattggtaaggtaaagtcatagatgaagaagtcatgttgtgaaatcttttgtggaatggtgtagtgttcgtgaatttcgggaaggatgatggccttgtaaggagccaaaatatcttgaacttcatttaagagatcccagatttcaggttcaacgaagaaatcattagtaccaaccttcttaatagcgtaagcaaaggcatcaagacgaatcatatctgcaccgtgcttaaccatgtcaattaatgtttccttgaagaattcgttagctaccttactcttaacattaatatcaatttgttcttcaccgaaagtgttccataagttttcagtagtaccatcatcaaaggtaatttcttgcttaggagccttatcctttcgcttgtaaattaaatcaacatcttcttgagttggacggttcttaccagctttttcccagaacttttcccaacgaataaagaagtcgttgtacttagaatcatcgtgcttcttcttgaagtcttggtacatttcagacttcttggaaatatggttaatcatgaagtcaaacattaagtagtagtcttcacctaatgcttcaacatcatcccagttaccaaaagcagaatcaacaacatcgtaacggtatggtgcaaaaccacggtcaccagttgatgggaagaatggaagtaagtgaacaccgccgattgcatcaccgatatagttctttaatacttcatgagtttctttaatatttttacccattgagtcagagtaagtaattaacattgcttcatttttgattggcataatgatatcctccaataattttaaatttagttagcttgtttagaatgacgagttgcaaagaaaataattaaggcaataactattagcattaccccgtagattgggaatggtgcggcaagatcaaggccactcattgggcgaccgactaatcgattcatccattcagcaattgttggtgagaagaaagctccaaagttaaaaccaatcagtaccattgaagttactaatggttgacgcttagcaggagctaaatccggtaacaagttaaaaatcaacggagaaactaattgtagtgggaagccgattaaaagcaaaccaattactaacattgcaaagttgccgtttgcgaaggcaaataagaagtttgaaatggccattaacccgagaccaaggtaaacagtgttaaaacctaacgctttattaattgatccgtagaataaaccaccaagcgttgccccaattaacattaaggaaagaaacattgatgaaccagtatagctacttcctttaattgcaacggttaagccagggaaacgattttccattccaacataatctacaaccaagaggaaggcaaagagaacaaggaggtaaactactggactaatctttttaattggttcttccacttcagttaattcttcagcaagatcgtcttctgcaacgttattatcttgtgctttgctatcgtcaggaacacgaactgcaaagaagaaaagaacaacgaaagcaagaagataaacggcaaatgatgcatgccaacctgcataactaagaattaatccggcaattgcaagggtacaagcttgaccgatttgttcagccgcagcacgccaaccaagcatttgagctcgggttgtaccttcataccaaactgaaatcatcgaaattgcttgagagttatataaaccaaatcctgctcctaaaactaaccgggaaatcaaaatcgcagtgtagtcattcgcaaatataggaacaattccggcaagaccaacaattgtaaccccggccataataatctttttatcagaaatattgaaccattgttgaagtaatggtgaaaggacaacaaaaatcattacagcaaatgatggagttgtaactaaatattctgactgtgtctgtgagattccgagtgccgcctttaattgcggtaaagaaccttgaatggcataagcactcgtaaccatgaacgaaactgacaggaatgccaatttggtaacaagagaatttttgttattcataattagtagatactctttctataggtatttgacaaacgtttatcatttctgtacatcaataatatacaatgaacttttcaaaatgtcaaacgtttaacaaagatttattacaaaaaattgtaatcaattacattgttattataacgcgctttaaatgaaaatagatgaaaacggatgagaacgctattttagctcttttttgaacaacttgtgaacaactatacattatatttttataatttttttattaaaaaagagtaaagcaatgactaattcatcgttttactcttttttacttaatccacacaaagcttcttgattgcctgcgcatagatttccatcgctttatacatgtctggcaatggccactgttcattagcttgatgcatataatcgggagttgttggtaacattccgccaaaggcaacacaattattcatggttcgagcaaatgttgccccaccagaaatttgtggttcagcatcaacatccccagtttgttctttataaactttcatcaaagtttgcactaatttactgtcttttggaacgtacagaggggctaaataatcaaaatgaacatacttcaaatcataagctgccacctgtttacttagttttgctagtaaattatcgcgatcgatcgttacgggaatccgtaaatcaatctgcattcttgtttcattttcattaatctcaagactagaaatattgaaagttaattgtccagactcatcgcgaacatcaccgagaacattgctccccgttgcatcttccttaaataatttgccaataaaatcaagtggcttaaaatcaaaaacatcatcaagcgcaatcactaaccgtaaaacagcattcgttccttccggtgccatcatcgcatgaacagacttgccaataacagtaattgaattaccgtcacttgtatattcaaagccatgcttatctaaagccgccttcacttcatcctgctttggaccatcgtacactgcactatcagggaccgcattaaacgcatttttcaagttaatctttagttgatctgttcctggaccaacgagataagattgttgcaaccccttttcagcataaattaatggaaattcagcatcaggagaaattccactatcaattggcgcttcctttttattatattcagcaattccacgccatagaatttcttcatcagttccataaataaaacgaattcgttgattgaagtgataaccttgatccatcaatgctttaacagcatataaagctgcaattcctggacctttatcatcttgtgaccctcgtccataaactgcatcattgattactgtgcctttaaatggatcatgtttccatttgcctaaatcgccggcaggaaccgtatcaagatgacaaattacaccaaaaattttgtccccactaccaacttctgcatagccatagtacccgtctggatcttcataggtcttaaaacctaattcatcacaaatcttcatcatttcatcgagggcgttacgaattcctttgccaaatggtgcgccttcttctgctggttgattatatgatggaacagaaattagtcgttctaaagttttaacagcagctttttgttcatcttctgtaataattttatccattcaaatcccctcctagagcaaggcagcaattcctaagaacaagcaagtagcaacaaagagataaatcattaatttcagcatccacttccaccaaatgccgacattaatatgcgcaattgctaatgctcccataacaactcccgaagttggggtaataaggttaacccaacctgaagctgcttgataagcagtaataacaaggctaccagaaacatgcgcaaaatgtcccattggtccgataattcccatcgttgccgcagctaacccagacgttgatggaattaagaatgacattgggatatagaaaatgtaagtcaaaataataaagatcgtttgtgataatccatgaaggcccaattctccccagtgaagaactgttccagtgatcatcccattattcattattacttgaattccccgtgcaactgccacaataattgcaacgcttaagaaatctcccattcctgacatgaaagcatcaataaattcactttccttcatatggtaaacagccataatcaagaccgacataaagaggaagagcatggtaatttcattgaagtaccatgttccaagaggtgccatatcatgccctaataaatcgcctaggaatggaatattaaccaaccactttgtaaatttatcaaaaaatgtccaatggctattaaggtttgaccatggaattagtcctagaatcatcacaacaaaagtaattccgaatagccaaataactgtcttttgacgaccggtcattttatggtcgtcattaggatcagccttgactaaaaagtgcttttcatcttctgctcgttgattgtaaactaatgatttagttggatctttttcaattaccgatgcatagtggtaaacataaataatactaatcgttatcgtaataattaaaaggattacccgggaaactaaaccatcaccaggagaaatatttaacgtttgagaagctactcctgtggcaaacgggttaacagttgatgctaaacaaccaacttgacttcccactaaagcaatcgcaaccgctacaattgaatcaaagccaacacccatcatcacggggatcaagagaggagaggatagaatgcaatcgtttcttcccccattccatatgttgatccaccaagagcaaacagaagcattaaaattggaatcaattgtttttctcgtcccttataccggcgaacgattgaaccgatcccttcgtttaatgcatttgtcttattaaccactcctaggaatccaccgataacaagaataaatagtgatactgagatagctccatctgtctttttatcaccgaccatcccgataacgggtgccataaagatatcccaaattccctggggtttatttgtcaccgccttatatgtgccagaaataatatttccagctttatccgtctcatatgtccctgctggtataatccacgttaaaattgcaattaaaataataattaaaaataaaattgtaaacgcagagggcatatgaaaatgatgttttttcttcgtttgtgtttcctgcacaataaccgcctcttttgtaaaattagtatcaattttattttaattcagtttgaaagcggcttcaacttaatctaagaattatccttaaagaatgctataattgccttgtagtaattttaaggaggatgaagctaatggtaatgaatcctaataaagcacaagacgtttggaaagacgccggtgaacatgtccaatttactgtattagaattaaaacgagaaaatcaagcaaaggaacaagaagcaattcaagaatttgttgaacggttccaagcaattactcgatcactgcgaattcgggataataagggtaatcttaaagtttctttaggctttagcaacgacgcatgggactatcttttcccaaatgcccctaaacccaaagaattagaaacttaccaaacattaaccgggccaaaatacaaaatgcctgccgcaaaaggagatattttcctccatattcgtgcaaacgatgaggctgcagtttacgaattcatggctcaagtaatgctctttattagagatattactaatgttgttgatgaaacaaagggctttcgctattttgaaggccgggccattattggctttattgatggaactgaaaatccggaacctcaggatgctgctgaatacgcaattattggtgatgaggatcctacgtttgaaaatggttcatatgcctttgcacaaaaatggcggcataacatggacatttggaataagctaactactgaaacgcaagaaaaagctgttggacgaaagaagttttctgacttagaattaagcgaaaaagagaagtttaagaatgctcataatgtcgcttcccaagcggaaattgatggtattgaacagaagattgtacgcatgaatgttccatattcagaccctgccgctgataatactggaactttctttattggttattcacggcattggactgtaactaagaagatgcttgaaaatatgcttgagcaaaacgattatctcctaactttctctgatattttaggtggtcaactcttctttattccttcgcgtccaatgttggatcaaattgctgaaggcgaattaaattagttgattgacaagttgaaggcaaattgctatattattagcagcaaattttaggagggatcatccattgaaattttaattctacacaatttaatgtatctggaactgtggattcacgcagaaaggtactacgggtagaattatttttcaatgattgatcaataaatgagaactaatgggccaataccattagtttaaaagtctacctgtagtggtgggctttttttcgttaccttttctgcgagtaacgaaagggtgattttttaatggaaccaatcacgataaataatttaacttttgcttatccgggacaagaaccgctttttaatcattgtgatcttaatattagcagcgattggaaacttggtcttcttggacgaaacggtcggggcaaaaccacactactcaaaatcttgcaaaagcaactttcctttcaaggaagtattcaaaccaatcttaagtttaactattatccattagtaattcgtgaaccgaatgattacacaatgaatgtccttatgagaagtggctatcaaggtgagcaatggcaaatcgaacgagaattaaatttgatggcaactcccacagaattactatggcaacctttcagtagtcttagtggtggcgaacaaacacatgtgatgctagcaaccctttttgcccaggatggatatttccccctgcttgacgaaccgactaatcaccttgatcaggatggtcgaaaacaaattgctcaatatctaaaagcgaaaaaaaacggcttcattatcactagccatgaccgagattttctcgataaagtcattgaccattcattagtgattgaacaacaccagcttgttttaacccgtggtaattacagtgattatttcgttcataaggagcaacgagattctacggccatcaagaaaaacgaaaatttattaaaagatattcatcatttaaagcaaacacgtcaggcaaaatctcaatgggctcaacaagcagaaaatgaaaagaagaataattctcatgcggataaaggctttattggtgccaaagctgcaaaaatgatgaaaaaagcaaccataatgaaaggacgcttagacaccgcaatcgaggaacgaaaaggacttttaaaagagattgaaaatgttgttccgctaacaattaatgtcctccccactaatcatcaactattgttaagcattaatgatctaacgttatcgtatccaactaaacaactctgttctaatatcactgcaaccattgaaaaaaatgagcaggtcctgctctgtgggaataatggtactggaaaatctagtattattaatgcaatcatcgggacattcagtggtaagcaaagcggagatatactttttagcagtgcccttaaaatcagcacagtacgtcaagattattctgataatcatggaagtttacgtagttttgcatcttcttctaaaattaactacgatcaatttcttaaccttcttcgtaaattagggatggaacgtgctacttttaatgttccgattgaagaaatgagtatgggacaacaaaagaaggttgaactagcacggtcattagctgagcccgctcacctttatttatgggatgagccgctaaattatcttgatacctataatcagcaacaactaattcagttaattcaagaaaagcgaccaccaatgctaattgttgaacatgatcaaaatttcattaagcaaactgccacaaagaaaattgaaatttaatatttcctgggaaataatcaaatttaccaacttaatgtaaaaaaggagctgtgacacaagttaggtcacttccacaaaatacgaacagcgcagtacaacaatggccttcatcgtccggcaaagtcgaacgttgaaggcctattgttgcttgcgggggctcgaaaacgaagtcacgagtgacttctgtctcgctcccataatttttagctaaattaaattcaattcagttaaccactcaagaaatagtgggaaccactttcccatatgattatctacccgatcattattgacaataccagtatattcgttagctaatgcgattccatgtcccccagtgccaaactcatgtaattcatatggaacatcatacttgattaacgcatctgcatatacttggaggtgatcaacaaagggagttaattcatcttttgccgatccccacataaaggttggtggtgtttgtggatttaccaattccgctacattttctgttgtaacccccatgcgttcatcaatcaagggttgaataacaggatatcctaatgcggcaaatttagcgtgtgttagtttttcgttactatatgcagcggcaatttggcctcctgcagaaaagccaataattcccagtcgatcaacgtcaacatctaattcatttgcatggttaacaatatattcaaatgcttggtgaactgctattttggcttcttcataatttttatgttcaactactggataccgcacaacaaatgtttgccatgcatgggttgcaaacgttaatgccacccgctcagaatctcgttccataatcttgttataactgcctcctggcaaaataacaaggccgggtaaagttttatcagtattactatgataaatatctagagacgaatatggttgatctaagttaacacttttaatttccattttctcacctcattttgattttgctaaatgttaaaattacaaataatagtataacctcaatatgcaataaacgatacaggtaaaaaattgttattaattcacaaatttccccttgtttatcatgatacatttgttaaagtgataaggtatcaattattatttgggggttagaaaatctaatgagtattatgaagactaagtcattctggattgctgctattatgaccttaatttgttctgttgctggggtgcttttagcaaaactaccttatgtcaacctgattggagcattggttattgctttattattaggtattgccatgcagttgactcctgctagcttgcggaatgaggctcaaggcggcatcggatttatttctaacaaatttttacggcttggtattattcttcttggtttccgcttaaacctagaaaaacttgctgccgctggggttaagactattttggttgcggctattggggttaccggaacgattgtcctcacttattggcttagtcgaaagtttggtgcagaagatgaattagctatcctttctgcttgtggctgtggtatttgtggagcggctgctgtaatgggggtttcaccacaaattgaaactgacaacgaggagcgcaaacgagaaaatgaagtattagctgttgccgttgtttgtgtaatggggacagtctttactttagttgaaattggaatcaaaccattactcggacttaccgatccacagtttggaattgtggctggtggttcattacatgaaattgctcatgccgttgcagccgggggagcttttggtgaagcaagtttagataacgcccttattatgaaactttcacgggttcttctcttagcgccagtcgctttaattgttggttactggtatcaacaccgccttatagttgaaagtgaagaagaacatactaaagaaccaaagaaattaccaattccttggttccttggtggttttattttaactagtgtgttaggaacctttcttccattctcaccagcctttcttgatgcacttgttcaagcagcctatatctttttaggaatggcaatggctgcattaggtgtttcagtaaactttaaggttatttttaaacgtggaggggccgtttttggcgcggctgtgattagctcaacctgtttattggtatttatgattattatgagtaaaatattcttctaagttattaaaagcgttaaattgaggatttattttagtggcatatagccattccgccaatttaacgctttttatttatattttttatttatattcttctatttaaccgtctttcccagctggtaagcttcttcaacatgtttagctagtttttgattattccaagaatcagctgcgagcacctctcctactttatcccaacgcatatattcaagcaattgcttaaaatataagttaagtgaagcaaaggcatctgcttgaccataaccacttactaaagtaatagctttctttccgccgtgaagttcatggttatagctgtagaaacgatcaatcactgcttttagcgctgcattgatcccgtaataatatagcgaactaaccaagactaccatatctgccgctaacagcttaggcattacttcattagtaataacatcattcggttcaatcgcaacttcttgtccgggatgattgtcctccaatttaatcatcgaaaattcatcggtccggcgtccagcatcaaagcgataaacttcatttcctgcttcagttgcgcccttaacaaaggcatctgctaattgctcagaagttcctggatgatggggacttcctgttaatacaataatcttcatcatgatcccgtcctttcttatttaattatagtgatagttcgactaaattagaaatagaaacattgaatattaatagataactaaaatgaattaacgaggccaactaaagattttcaaccaatttaacttagtacgctctcgtttttgttcttccttaatgtatgaacgatccgtaatgaaatgaaagatattcatgcctattcctcataaatatgttcactaaggtagcgctcgcttgaatcaggaaataccgtgactaaattagccccgtgtggcaattctttagcaacttctaaacttgccgcaagcgcagccccactagagctaccaataaagaggccgagatttttagcaacccagcgaacataatagaatgcatcctcatcactgattgtttttaccccggtataatctaagtccttgaaaaacggtggaataaactccactccaattccttctgtacggtgactatgggctggacccccatttaaaatcgatccggctggttcaacaatatagccttttaattctgggtaagcatcttggagcgccttttgaattcccgcaaaagtgccaccacttcctgcaccagctacaaaggccgccagcggtttattagcaagatcagctaaaatttccggtcccaaggtgcgttgataaacatcagcattcgctggattctggaattgtaaaggcacgtaagcatccccgatttcagcagctaattctttggcggccgcaattgctcctttgatcccttcttcactcggagtattaatcacttcggctcccaacgcacgcattaatgtttgcttttcaaaactaaacttttctggtaccactaatttaactggtaaatggtattttagtgctgctaaagcgactccaatccctgtatttccggcagttggctcgatgattgtcgttgtatcttttatttttccttcttccattcctcgctggattagcgccatccccaaacgatccttgatactgccacctgggttaaacatttcgagcttagcataaatattaacgtcattcggagtcttcatcggcaagtgcattaagggggtgtgaccaatcaaatcataagtattttcaactaacataatagttccttcttcctcagaaaagtaagtgggaattaacctcctcgacaaggcggtgggctaaggatagaacggtgattagcacggcacgggctgattatcgttcgaacttagcctcgagccttgtggttaatttccacgatatcgtaacaatatacctataaaaaacgaggctgttgaaaaaacaaaagttttttctcagcctcgccttatgtgttatcaacttgatagtaattcaattaaaaatgagtataccaaaaagtgagtcgcataagacgcgattcacaacaacaaatatttgcgttaacaaaataattgttttccattggtaatttcctcgtatttcaaattacagtaataataactagttaaaagtaagttgtcaagaaaatttacatagacaggtgtaaaataaaaaagaatcattttataaaacaggagcgctacacatgaaaaagaacggactattattagtcaatctcggttcacccgatacgccaacaactcccgacgttaagcgttatttgaaagaatttctcagcgatcggaatgttatcgaaatgccaccagcactatggcaaccactccttcgcggaattattcttccaactcggtcatggcgatcagcgactttttatcgtaattgttggacaaaagatgggtccccattgattgtctacacagaacggttggttgctaaggtccagaaattgatgccggagtggattgtcaaaatggcaatgacctatggcaagcctaaaattagtgacacaattgtcgaaatgaaaaaggaatgtcaaaatattacggttctccctctcttcccttttttcactaaaagcacaacccaaacgatcattgagaaggtaaaggatgctgatccagaagcgaaaataattgatcgtttctcggcagaagaagattatttagacttattggctaagcaaatccaaacggcatgggataaagggaaatatgacaaattactcatttcgtatcatggaattccgacagccatggttaatcatggtgatccttatcgtgatgaaacagaagcggccaccgcggaactgattaaacggctggacattcccgaaaagcaaattaagatggcttaccaatctaagtttggcccaatgccatggttaaaaccttacctccggaatacgctgcttaatgaggcacaactcggtcatcgtgatgtgttagtcgttgctccatcatttgtagcggactgtttagaaacattagaagaagatcaagtacaaaactatcaggtctttcgtgaaaacggcggaaataaccttgtaatggtgccttcgctcaatgactcaccagaatttgctcagtttattactgatcttgtgcaacgaaagggataaaaatggaacgaaaaagtttagacgaaatcaatgggagtgttgatgtaccaaatgtctatcaaagtgcattttggcagaaatttctcgcttatagtggtcccggtgctttagtcgccgttggttatatggatccaggtaattggttaacgtcgcttgccggtgggagccaatatcgctatcagctattagtggtcctttttactgccattttaatcgctatgtatatgcaatctttagcaatcaaactcggcgttaccacccgaaccgacctcgcccaagcaattgcgcggcgtttacctactcccctgcggattgccctgtggttatttaatgaaatagcgatgatggcaacggacttaaccggagtcgttggaactgctgtcgccttaaacatgttattcaagttgcccttacttatcggcgtcctgctaacaattgcggacgtgctagttgtcttatttttccttcattttgggatccgccgaattgaatttatcgttttaactgctattctggttgtcggcgccatctttgcgattgaagtctgtcgggcccaccctgaattttccgcgatcatggacggttttgttcctcgttccacaatttttactaatcacagtgagttgctaattagtttagggattgtcggcgccacgattatgccccataatatttatcttcattcctccctggcgcaaagtcgacgctacgatgaacatgatccagagcaagtcaaagaaacgctccgttttgctaattgggattcattaattcacctttttgcagccttcatcgtcaacgcccttctgcttgtactaggcggaaccctcttctttcatgcggcaagtctcggtagtcttgaggatgtctttttcgggctaaagaatccccatatcgttggtgctctagcaagcccattaatgagttggctctttgcctttgctcttttggtaactggtttaatctcctccatcactagtaccttggctggacaaattgtcatggaaggatttatcaatattcgcctcccactctggaaaaggcgtctccttactcgagccgtaacccttgtgccaatcctaattatcggcttcatgattaattttaacgaagagcaatttgagcaactcatcatttatgcgcaaatcgtcctcagtatcgccttgccatttacgctctatccccttgttgctttgacaggcaataagaaactgatgggaccacacgttaattcaccatggcaaaccgtccttggatatgttttggctagtttggttactgggttgaacttgttggtgttggtataatttttatttattataaatccaatagatagatacccttattttcaattatcagtgtttaaaaaactaatcaaatattgtaagataataataaattttgttgtaatttttgatgcaataaaagactggtcactatttacttttgggatagtaatttgatattaaaaatattttatctttggtgtgacgcttttatcaatctcattttacaactgaattaaagaagcagggctgaacgatatttatgttcaaaccctgcttctttattttagtttcgtcgtgcaatcatcacgcgctgtccacctatttgtttaactttaatgtctttaaaacgataatattccagtagttgacgatagcgttgtacagtagtagcagtaatcactatggttcccttaaaagcgaggacccttatcgcctcttgcaaaacacgtccttgcgtaattgccggttttacctgctgtaaattactaatcagaacatagtcaaactgatgatcagtgaaaggcaaattagtgttatcagtcaattctactttcgcgcgatcagctactgcctcttctttgatcagttctttcacttgctgtgcttgcttttcatttttaactattcccataattttgccgggagcagtcaattgcttggcaaggttagtaaacgtttttccattaccaatgctcatatcaaggatttgaacatccccgcgtatcgataaatcagcacttatctttttccagacctgttgcctttgccagatcaaccatccaataattccaacaactataacaattacgatcccaataacgactatcaattctcttcacccattattttaactaacaatatcgtttagcttccgaatatcctttaactgcccaacaactgtgattttatcgtgcggttgaataacatcattagcttgtggcatttgattaacttcatcatccttactaacaatgataatcacattgacattataacgattacgaaaattcagttcgtctaaggtcttattaaagaactttggattattaatatttacttctgccaaagttatttccttactcaaggtgacataatcaacgacgcttggatttagttgttgaaaaataagccgcttagctaaatcatgctctggacgaacaaccatatcagcgccaattcgttccaaaacgcgcgcatgattaacattttcagcccgacagattacatctggtgccccgagttctttagcaattagcgtggccatgatacttgcttcaacattttttccgattgaaatatacacatgatcaaaactaccgatatcaaggtcacacagagcatcctcatcttgcgcgtccgcaattaccgcccgcataactgaccccgcgaattcatttaccacttcttcactagaatcaatcgccaatacttcttgaccagcctgaactaaagcttcacatatcgaggccccaaattgcccaattccaataacagcataactttcttttttagccaattaacacactctcctctggataacgataattcttcgctgctgtacttgcatttaggattgagaacattacagtataaattcctacccggcccacaaacattaaaaacattataataaattgacctaataaattaaggtgggttgtaattcccaacgatattccagttgtcccaaaggctgccactgcctcaaaagtaacatacgccaacgaatcatgttttggcaaatcctgtgtttcaacaagcaacaaaattgatacaagcaaaataaataaagcaacaaatagtaatgtcaaagcacgataaatattttcttgggtaaaccggcgatgagcaaatgtcgtgtctcgctgcccacgcaaagttgcaaaactctgaatcgttaatagaccgattgttgtggttttaaccccaccagcagttgaccccggcgttcctccgataaacatcaaaataaccgtaaacgcgaggccggcagcacttaaatcagtataaggaaaagtaattaaaccggcagttcgtggcgtgattgccataaaaatagtattgagaatacggttggaaaaacttaacttatcacttaattgtgctaagtttttctcggtaataaagtaaacaaccacagaaacaacgaataaaactgctccagtacgtaacgctaactgagtatgcaaggatagccggtgatatttaggataattgagaatatctttccatactaaaaatcctaatgatccggcaacaatcaaaacagcaagcacacatagcatataagggtcattagcataatttgccatactattatcaaacaagtcaaagccggcattacaaaaggctgagattgaatgaaaaatactaaaccatattcccttaccgagtccgtaacacggataaaaatcaaaaaataaaaatattccacccgctaattggataagtaatgaaagccgaataataaggtaaaccacgttcaattgggataagtggtcaagattaagggcttcttgagttaataatcgtgttgacattcgcattcgttgccggatcagtaacgacatcatgactgcaaacgtcataaaacctaagcctcccacttccatcaagattgcaatcacaatctggccaaataatgtccagtgatgagctgtactaacaagagttaatccagttacgcaggttgcactcgttgaagtgaagaaagcagtcataaaatttgtcgtttctcctggtcgtgttgcaaacggcaaggagagtaaaattgttcccataaaaataacaattaagaacccaaatgtaagaattttgggaaatgtatatttatgtttatttatttcaatcacttttatccttcctcatatcaatattactcaactaattataagcgtttttgttaaattctaaaccattattttatttcccgggaaatcatctcgagaaagcgctacaatataactgtagattacccgattgcttttcctgaaaggagatccttttatgtactattcaaacggaaattatgaagcatttgctcgtccccgtaagccggcgggagtggataaaaaacatgcttacattgttggtgctggtttagcaggcctttctgcggctgtcttcttaattcgtgacgctcaaatgccaggcgaaagcatccatatttttgaagaattaccaatcgctggtggttcgctagatggtcaagatcgccctgatgttggatttgtcactcgtggcggacgagaaatggaaaaccactttgaatgtatgtgggatatgtatcgttcaattccatctctggaaatccctggtgcatcttatcttgatgaatattattggttagataaggatgatccaaatagttcaaattgtcgcttaacttataaacggggcaatgaggttcctactgacggcaagtatcttcttggaaagtcaactaaggaattaatgaaactaatccttacacctgaagaccagctcggcgatttaacgatcagtgattacttctctgaggactttttcaagagtaacttctggatttactggtcaaccatgtttgcttttgaaaagtggcattcgctagcagaaatgcggcgatacgcaatgcgatttatccaccacattgacggcttgcctgactttactgctcttaaatttaataagtacaaccagtatgaatcaatgactaaaccattgcttgcataccttaaagatcatggtgttaagtttgaatacgatacccaagtccaaaacgtcctggttgataccaagaatggtgaaaagcacgctaaaaagattattcttaagcaaggcggcgaagataaaaccatcaacttaactgacgatgatctggtatttgttactaatggttcaatcacggaaagttcaaattatgggagtcatcaccaggtagcacaaccaacccgagcccttggcggcagctggaaattatgggaaaaccttgctaaacaatcgccagcattcggtcacccggatgccttttgtaaaaacattcctaaccgcagttggttcatttctgcaactgctaccgttaagaatccacaaattgaaccatacattgaacgactaactaagcgtgaccttcatgatggaaaggtaaacactggtggaattatcaccgtcactgattctaattggatgatgagttggaccatccaccggcaacctcattttaagagtcaaaagccaaatgaaaccattgtgtggatttatggtctctattctgatacagaaggtaattacatcaagaaacgaattgttgattgtactggggaagaaattactaaagaatggctctaccatctcggtgttccagaagctttaattgacaatttagcaaaagaagagtcggttaataccgtccctgtttatatgccattcgttactagctactttatgccacgggtaaaaggcgatcgtcctgatgttattcctgaggggtccgctaacttagcctttattggtaactttgccgaatcgccaactcgggataccgtctttacaactgaatattcagtccggacggcaatggaagctgtttacagcctcctcaacgttgatcgcggggtaccagaagtctttaattcgatctatgatattcgcgaattaatgcgggcaatgtactatatgaacgataaaaagccgcttgaagaaatggacttgccaattccaaagattgttgagaaaccactgctcaagaaaatcaagaagaactggattggcgaattaatggaagaacaacatttactttaaaaaactaggggagtgaggcattaggtatctctacttttgtcccactcccttcaatttaatataaaggagtcttttttatgaccaatgaaacgattaagcaccaattaaaccatcgtacaattcgggcctttaagcccacaactctttcaacagaacaattgaatactctttactctgttgctagtcatacaccaaccagtatgtttatgtagcagatgtcaattatgcacattaccgatccagataaacgggccgtaatcagagaaattagtaagcaaccgtatgtcggcgcaaacggtgacctgttcattttgttagttgacctttatcgtaaccaacaaatacgacagcaaaagggcaaggatgatggccgtttacataccgctgatattttcttccaaggccttgatgatgcaatcatggctgcccaaaacatgattactgctgccgagagtatgggccttggcgttgttccccttggttcaatcaaaaatgatccgcaaaaaatcatcgaagtccttaacctccctaaaatgaccttcccagttttaggcttacaaatcggtatacctgaccaagaacctcaactaaagccccgcctgccattaaaatttatcgcatttgataatgactatccaaaagagatcaagctcagtgacttaagcgattatgatcaagaagttactacctactatgaccttcgtgatgccaaccgacgaattgattccttcaccaaccagattgcgggggctaaactcgatcgccactataccaagcgcgatgaaattatgaaggtgttacaccgacaaggtctttgcactgatgaaggaattgattagttcatcccctcaagagcagctaatgtcgttaaggtcgcatcataataatttttctctgttaagggtttactgaaaatgtgtttctggctagcaaacagattatcatacccttcattacgattgcagctaaccgcataaaaaatcggcgcactgaaactatttgattgatatttaaccaatcggtgaccgtttaatgaatagccagccgtaatataatactgttcactgaagaacctcatcattttatttaagactttctgagctcgtggatcattgctttttgccaacatcattggaacccgacaagcattcgcactatagtctccatcatattttccagcaaccgtattcggccccactggcttggtactccctggtcgagcccaggcaaagtcaggtactagtcctgttcggtgctgtttacttaatgcagtcagacggtcaagcatattatttttgatcatctgccaccttgaatcgtgagtacaatcgtataaatgatcaaaaactgtcggcattacatctgaagttcgcaataaataataaaacttagaatccttcgtaacccaatcacccactgttaacatgtgcgtggttgggttatattcatatttcataatatcagtggcaatctgttgctctagcttatgataataaggtgctttttgtggccaaacttttgcagcccggtgaagagccgcagcaatgtaaagatcaccatcagtcgcactattatgatcatcaacccattgaccttctttattataagactgacgccaggacattaagtaagttagctggtcatggtgttttccaacataatcgcgatgtgcaaggtaatagttaagtaacttatcaaagtcattttcacttgcccagcccttttcagcagcgcgagatactacttgcagcccgtagccttgtccttccgataatgcaacaggatgtttttggtcgttgctggtattaacatacgtttgcttattatttttgcggaccaaatatgtcccctgccaccgccgataagcttcgtattgaatatgttcaggattctttattcttacaaacgcgagcgttgcaatataaataactgcaacaacgagcgtaagaagccaaatatatactggacgtttcataactaatccccttattagtcagcaaaccgcttagtctttacccattttgtcccgtcacgccgtaatagtcgatcaagtgcaactgagattaccgcatgaatcgaaacaattataaataattgtgaataggtaaagtatgaagcaagcgctaaccagatttgcttattcgtcgcttgcccaaattgcgtagctgctgctgttgtaatttgtaaaatatacaagattatcattaataaccaattaaaaagcaaaagttgggcgattaggatgttactttccccgaatgtaaagggaatcattacctgtggattgaaaagatgaacaatccaaaaacctacgttcgctaaaaagattgcatcagaaagaacaattgccgcattaaaccagaaaaaagtacaggaataataaagagtttctaactttactcgccaattgctccggtcaaaaagatgcctaaaatttttcaagacaacctgataatttccttttgcccatcgtaaacgctggtagtaataatcatgcaggcgttttggctcctgttgaaaagcttccgaattataagctaacgcgattagttttccactttgcataatcttaaatgaaatatcagtatcttctgttaaggctccatttgcccagcctccgattgaacggacatatttactttgaatgataaagttagttcctgggatccggccaattttaaataaatgccaaattgcacagtgctggatccgttgggtaacaacaatttcttgattaatgcacttcgttaaaaagttttgctcggcattgcgtgtcttattccggccaaatgctgcaacgtaccgtgttggattttcgaggatttttcgtactaagaaatagagggcgtttttttccggcattgcatcggcatcgtaaacaccaatatattcaccatgagccattttaagggcatcgtttaagacaccggccttccctccgctaccatgacgttctatcacctttgcttttcttttctcatattttggaagctgtaacactgttcgggcccgttgagcagtttgatcattgcaattatccgcaaagattaataattcgaccttatctgctggatagtttaattcaaggattgcttgggtcgtctgcgcaataactactgcttcgttatgagcgggaacaacaatcgtaattaatggatatcgttttaatgggacaatatccacaatttttctactatgctcaagccaaaagtgaactgccccacctaatgtaatagatgacattaatagcgaactccaaattgagatcagggtcacaatcattacaaactcggtcattgctttttcctttccctttttacatttagtgttgtctgttcaacgcgaaaataaatcacccactgaagaaccgcaaatattaatgcctgaacaaaaaagatcatcgtaatcaccatcgccaaccaaaagaaaattcgtatcattatttctgaactcctcttagatactcaacgacaaggtctgtttccatatctcttttaatatgacgcattacactttccagattcttaaatgaagtcgcattaatatcatcaactttcaaatgtccccatttaaattgaggctttgaattattaatttgtaattcatcaagtcctgcacgtgtgctttggttctgataagcaaatgtaatatctggtaaatgatatgacaaaattaaaaaagtaccatcttctaaatagtacagggcttcagatggtaatcgtcgtcgttttaagactttcgcaatttgttgaagggcatagttataatcttgaggatgaaattgacgtatttgttgattatgaacccagtgaatcgctgtaacatcaatccataaatcagcaatctgttctttaataatgaattgaagttccttttcataaatcttattagcattataggccgtctgaagttttactatttgattatagtgggtcgcatagctttctatctccgcacgattgcggtcaagccagccccactcaccaataatgtaccgactgaaatacgccaaacttgcggtaattggaaaggcaaacagtaacattattttgattgaattatccattaccacataacctagcaataaaatggcactaccaatcgttgttaggccgattgcaagccaggttaaaataatatttggtactaagctccctaccattaagcccaaaatgatcataatcatcatggccgtcgtaataaaatgggcgtattgggatgcccaccacatcattaacacaattgcagtcaatattacacaaagcgcaataagccccgattctacaatatgtcgccgaatcataagaatgttctccctttcttcctataaattagcaactaatatcttagcacaccttttttagatttcactagtttaaaagcttggtaaataaggagttatgctttgtttgtaaaaataatttatcattttataacaagtaaattcccttgaaaaaattactcttttctatatttaaatttatagacattcatattagatatgttttatttttgtacgttgataagcaaaagcacaataattaaggtaaacaaaaaagcctgatttaactgtgcaggaaaaatcaggcttttaacttagtaaactcatcgatgaaacataacgttgctgatgttaattggataaagggatgcattgtttcaatgaagagtcttttatctaacttaaaaaacaagtggatttcttgtttgtaagtattatagcacacctattgtgaaaatgttaactaagatttaggatgattaaatatttttcgcaataatttcttatttatctactatttatcttattttccagcagtgattatcatcacaatatcacattatttctaattaaatttagaaataataaattaccttgtctgtctctgattaaaattctcctcggtattttatagataatatcattacttttatctaataattttcattatatctagttcattatattataatttagaaaaataaatatttttatgtgattggtgttaaaaaagctaagataagggtgataaataaattttgataaatttgtttaaaagaaatgaatttattattcctgatcacaccccatacggtcagcagcgatgattttatagctatttataaactactatttcattggattttatttatcaatttttatagaaaggagcagagttttttttactttgttagctaagtttaggggtatcatttgagttatttaatttactttatagctacttttcttcctttatcaaattgattaaattgcttggattcatatcactaatacttttaacctagtaattctcttttagcgtttctcattattcttagaagcttcttagaagcgctattgtttgatccaaaaatagaatattcattaatacgcaattacaaagcaatctctatatttaagctttctaatcaaaaagcaacctcagcgtcatcctttgacctcgagattgctttttatttgattactgatttccagttaatttccgacggactaacgttggatcagcctttcctggattcaattcgaccagtttccccgatccactgtaaataatccattctgctaagttaacaatatggtcgccagcgcgttctaaattccggataacggccaaatagctttcataggcttttacatcttcgccacctttaaccagtgctttcatgatttctttttgtaatttcacataaagtaaatcaactttcaagtcctcgttagcaacctcataggcaacctgctcatcagtatagacataagcatcaaggattcgttcaagcattttgcgaacaatcatcatcatctgttcaattggctgttcgatgtcttcatgatgttcaaatttacttaaggtaatcgcagcgcgggcaatatgggtcgaatagtctcctaatctttcgatatcagtactagcttttaagatactgataattttccgaaagtcggttgcaaccgggttttgtaatgccattagcttcaacgcctgtttttccaaatgaatttcttcatcgttaatctttgtatcagttgttaaaaccttatctgctaagtccgcatcatgatccgtaaatgcctttgttgcttgatagatctgctcactagcgtcaattcccatttccatgaagtggctccgcagccgttttaattcatcatcaaaaattgctcccatgttttcactcctaaccaaattttccgctaaggtaatccgccgtttgttgttgttgaggattcataaagatatctgtcgtctggttaaattcaattaattttccttggtgcataaaagctgtccagtctgctgaacgtgatgcttgctgcatattatgggtaaccataataatcgtaaatttctcttttaattgtactaaagtatcttcaatttgcgaagtcgaaactgggtcaagagcacttgttggttcatccatcaagataatttctggttgaactgccagcgtccgcgcgatacaaagtcgttgttgctgccctcctgataaggcgagcgcactttcttttaagtgatctttgacttcttcccacaaagcggcctgacgcaaactctcctctactcgttgatcaagaatttgccggtcctttactctggcaagccgtaatccataaataacattctcatagattgataaggggaacggtgttggttgctggaagaccatgccaatttgttgacgaatccggtaaacattaactttaggctggttaatattcaagtcatgaaaattaatttcacctttgaccgttgctaagtcatcgttcatccggttaagacttcgtaacaatgttgactttcctgaaccagaagccccaatcattgccgtaatcttattggccggaaatttcattgaaacatcatgaacaacgtgtttgtcaccatataatacttgtaaatttttcacttcaagagcaactgaattttccattcttttatcctcactttgcaagtcgttgcttaattaaataaccaatatatctagctaataggttaaagattaaaattgttagaatcaaaaccgctgctgaaccatttgaaacagcacgggcatctggaaccaatccctcactgttaactttccagatatggacagctaaagtttcggctggtcgtaatggatttaagaaactggtaggactaaatggattccaattggtatagctaattgccggtgaactctgcccggccgtgtagattaaggcagcagcttccccaaagatacggccagcacttaggatcgctccagtaataattcccggtaaagcagccggtaaaacaattttagttgttactcgccactttgacattcctaatcccaatccggcctgacgttgaagataaggaacttggcaaagggcgtcttcacatgcccgcgttaaaatcggcaagttcaaaattgttaatgctagtgcccccgcaagtaaggagaagtctaacccccattgcaaaacaaagactaagtaaccaaataatcccactactactgatggcaatgaactcaaaacttcaatcgccaagcgtaataagtttgtccaccgattatctggtgcatactcacttaagtaaatggcagcacacaatgctaaaggaatcgaaacgattaatgttaaaacaaccaggtaaagagaattaaataattgatcacgaattcccccaccacttctaaatgattcagcgcttgacgttaagaaatgccaagaaatatggggaattcctgatagtaataggtacgctaacaaggcaaataaaactaaccctactaaaccggttaaagttaaaataatcacggttgccaaccgatctactttttctggacgcattattttacccctttccggctaacgagccgcattaaaagattgaaggccaaggacattactaatagaattaaagctaaggaccagagtgcattgtttgagatcgtccccatgactgtgtttccaattccggtagtcaaaacactagtcaaggtggccgctgaatgcatcaatcccgttggcattaccgtcgtgtttccaattaccatttggactgctaaggcctcaccaaatgcccgggccatcccgaataccattgccgttaaaatcccgcttttagcactcggaataatcacccgcgaaatcgtctgccagcgagttgcccccagccctgcagacgcattgcgatattgtttaggaactgccctaaaactatcaattgtcatcgaggtcattgttggtaaaatcatcaaaaacaatacacaagtagcagcgagaatcccaaagccagtgccgccgaaaaagcgacgtaagaagggaacgattactgttaaaccgacatagccatatacgacggatggaattccgactaataattcaatggtcggttgaagaaacttatatgcggttgatggcaaaatctctgtgattgcaatagctactactaaggcaagcggcaaagcaattactcctgacaaaagagtaacgctaaaagaagtggcgatcatcggtaaggccccgaatacatgatcacttggccgccatttaattccacttagaaaatcccacaatgaatagtgattgccagtaaagagggcaattcctttccaagttaaaaagattaagatcgttgccactagtcccccaattaaagtaattgcaagataactaattactttccctgaggcttcctgcttactttcaaccgagggctgtgtcaaacgttgtcgtaagtcttccatcgtactatttcctttcagttactttcccagttggtgttttttcaactttcatatcatgaatgctaatatagtgagcttctgttacaagcgtcttttgaactttctcgctttgcatatacttaatgaaatttgcagttgattgggatggctgtttttgcgtatacatgtgctcatatgaccataatggccacttattagtcgtaatgttatcagcagttggtgctactccatcaaggttaactgactgaacttggtcattaagataagcaaatgcaatatagctgattgcccctggtgtatttctaataatttctttgactgtcccgtttgaatcttgttcttgagcatttactgcctgcatccccggtttcaataccgtctgttcaaacgcaacccgggttccactcccatgagcacgattaataactgtaattggcaaatcaggtccgccaacttcttgccaattcttaatttgaccagtaaaaatttgttgaagctgtttcattgttaaattcttaatgccaagttcttcattaacaattggtactattcccgaaacagcaacaatattatcatctaatttattggcattaattccatcttgctggtcagcaaagatatcagcagatccgatatttactgctcctgcttgtacctgactaaggccggttcctgaacccccaccctgtacaataatgctggtttggggatgcttagtccggtaatcatttgcaactgcttcagctaatggttgaagagctgttgagccgacaatggtaattttttcttgtgatggttgttgcttagcgagtacccatgacccacctaaccaacagactattgcgacgataacaaccccgataatcgttttttcattactattcctacctgtttattagttgttttcatatatttcgtatggtacaaatagagaatagcaagtcgatgtaaatttttaatctttgtaatgtaaaggttatgtaaattttggagaaagtattatgaccaataaatttttgctaatgagccagcaacgatctcgtccaccagttacaagctatttgtaaaaaagaacactggacctatgagctcgtgactactccgactgggttagtagtagccttagaaaaaaatcaaattagcggaatttggtgggatatgacgaagtaagcttagacaccacgattgctaccatgacccttattcggtcgcaagtccaaggaccgattaccgtttttactcctcgctttacggaacacattcaacgaaaattataccgggcacatgttgatgatgtaattgcattcctctcctccccagtattttccgctccttaatcagcagcgcttgtggacttaccactatccacagatgcattcattagctgatgataatacaaccaaaaatgacccagtaataactactggatcatgggaaattaatcaaaaacctatacttactaaaaatgataaaacaattgctttaacaccaaggaatttcaattactttcttacttagttgatcataaaggacaggtattaaatcgggatcaactcgttaatggagtttggggatatgatattcttgatacttcacggatcgttgacattcatatcagtcacctcgcgataaacttgaagatgactcccaacaccctactcaccttctcacagtacgggatttggctataaatttgtttaaaatacccgaaatgtcaatttaagttagaagaaagtagttgctcatcagtgacgtaggacatgaatacctcatatggagttcgatagcctagtgatttgcggggcaggttatttcgcttactcatcagttgggtcaccaattcatcaggaagattgcggaaatctagctgttttgttaagccgtcccggcgtaaaagaccgttgttgttttcgttcagccctcgttgattgggagcaccaacctcggcaaagtaagtgtgaaggtcaaattgattggcaatctcgcgccagccggcgaattcttttccgttgtcaaaggtaatcgatttgaagaagtgctgcgggaatttccgaagccactgacctaagtgttggttaatcgcatcagccgtcttttcgtgcacattgagtacaatttcgaccttcgattggcgttcggtcagggtcattaccgccccttggtgctttttgccttggacggtatcagcttcaaggtgtccaaattcagtggcatagtgcggaaagtccttggcacgctcgtgaatacttcgccccaattggccagccttccgcggcgctcaatatagccattcgggtgccgcttacctcgcatgggcaaagcacggacatccaaaccgaactgcccccgttcaaacatccggtaaagagttcgccggttacaactaattgggcgctcagcgcgcccaataatggtgtcaggcgtccacccctgggcaattttgtcgttgatataagtaagttcagccagtgacaactgagtacgttttcggccacaacgttgcttattgcgcatatagtgatcttgataatcagcaattgaggcaccggtttccaggtaacgataaacgcgataaacggtttcggcgctacggttgatcatttgggccactcggtacgctttaagcttttgcacgaaagaatgggcgatgattgtcagctcgtttgtggtaagatgggtgtaagtcatttgtggtttcctttcttttgtttaggggtattcaaaagtctaccacaaatggcttttctatttttctaacttaattttacaaacggcgataataaaaaatgagcgcggctggaaaaaaactcctagtccaaaataaaaaccggatgatgaattttttgaacaattcatcatccggtttttatgtacacaggaaatcgttcctgatatgatgtaattatccctaaaaacaaccaaagggagcgagttccatgtatccaaattataccatagggcaaaccgaattctcactaaactataactatgatttaccacaaaatcatgttgcacgattaattagtgattttgtcgactcgattccacaagatgtgctattagaagattcagtagcggctaccggccgccccttcatcgcatccagcaattatgcttaagattctcttgtttgcctacgcacgccaaacttattctggaagaaagattgaaatgatgttggatgagaacctaccaatgcgttggttagcttatgattatacttatagctaccataccatcaataactttcgccgcagtcagcacgccagtaagctaattaaacatgcctttgtctactttaccatggttttgaaagatcacagactaattcaaaacgatgcggtttttatcgatgggaccaaggtagaagccgatgccaataaatattcatttacttggcgacgggcagttgaaaagtatcacgctaagttaagagaaaagacaagtaagctttatgaggaactagtagaaaagcaagtggtgcaagaaatggcaccggagctggttacttccgccgaaggcatggacgtaatggaacaagaactggcggagaaaatcactaagctagatggagagattaagcaagaaccaaaaatcatcaaaggtggttcagtgagaaaacggcgccgtcgttttctaaaaaagcttcgtcaccaattaagcaacgacctaattccgcgtgccaaaaagtatgaacgtgccgaaaatatcttccaaggtcgtaatagctattccaaaactgaccacgatgcgaccttcatgtgtatgaaggaagatccaatgatgaatcgggagttgaagcccggctataacctgcaaatcgctacccataagcaatttgtccttgattacgggctgttttcaaatccaactgacaccaggaccttagtgccattccttacccagtttcatgctttagatttctttgaacatatcgtcgccgatgcaggctatggtagtgagtacaattacacaatgattcttgatcggtttgaaaagtagccggttatcccatacacaacctatcaaaaggaccagaaacgtaagtttaaaaatgatccaactaggtcacagaattgggaatataacgctaatgacgactactacattgatcatcaaggagttcgttttagtttttattgctacagtaaatccactgatgagtatggctttaagcgtgactttaaactgataaacatcaactatcagttaaattagatgagctagcgaagacaccaggtggtcggcaacgctatatgaaggttaacccaacctggaattattataaagctaaagttaaagataccctctcaagtgacgaaggaaaggcaatttatcgtcgacggatgtccgacgttgagccggtctttggtcacatgaagagggattttggcataccccgaactcatctcagtggacaacgggctgtggaaaatgatatcgggctagccctgatggcattaaatctaacgaaatttggccaatcaattagtcgattgaagactaatttcataactaatttaaaatccgaactacgatttttggatcgatcaaaaatcatagtccggattttattgttagagaaccaagaattaatagttaattcccagcctcgttttattagtgtaatcaatttaatttatctttcatccgtgtgaattttagtaaaactaaatatactgttcaaccatgtttcgatactttaatagttctttttgccccatggaagaatcggggagaacgacttgaacgctattgttgccaccattttcatccatttgctgacgtccccatacccctaatgacataatgagacgggcaatttcttgaccacctgtcgtgagaacaaaacaaccagcttctttaatcggactgattaagtatttggtttgtaattcctcaattatggttatcgattgattatcagaaatattagtcaataattcgtgtaaatcatcaaagtccagcggttttattcctagccaaaaaagaactttagagtaatcagcattacgcaaaaagcttaaagaataagtaattccatgattagcttcttgattcatcattaacccactcccgcgtacaaaatattgtaatattcatcacaaattataacatgaggaaaaagcaatctcaaaataaccccctatttatttatcagattattaatcttaaagacacttttataaataaagtcaatttatacaatgaaatcgctatcaataacattatattgtatatttactttttagtaaaatttgtgcctcttttattccaaagaaatgtgatttaggactactcatcttatgagcgatcaatatttgttgcgcttgttcacactgtacttttgctaactcatttggctggaatatttgcagatagaatgataattgccgtaatttaatcgctaactggctccgcgccttcgtcaaagtcacatccttaaactgcttataatcatgaatcatgaaacgagttttccggcgctgtaaagcatagttaattgaattgctcttaatccggtgaagatcttgaactgtgaggccgtgttgacgaagaagataattaaacatcgtaatctgctggtcgacttgtcgccaatccgttgcaatatcatctcgtaattgtgtaatctcttctttggtaagacggtgggtaactccttgttttaattggtgatataaggtttgcagatcttgataatcgcgttggtggagtggaaggtcaacctgactaaataagttgcatcgctggtaaaggatcgtcccttcgtggttcttaaatccctgctgggcaacaacaaactggaatatcttttttggaaaacgccgaccagcttgataagccaacagaatactatccatatacaggttaatttcattaatgcctgcctggatctccctagcaactttgtggggaatgcttgcatgctgctggaagtgagagatgcctaaaaatagttgccgaccagttgtccgtgaacgtaagataaattgattctttaaacgccgaccacaatcacaatagaggttgtcgccaggatgatcatgttgtcgctgataccaaggatcaattaccattccctgaaactcccaatcagtctgtttaagatagtgatgagtatgaaaacgcgatagcatcgcataacgcgtaaattcactcaatgcctgaacctggtctggccttaactgttgtaaaatatcttctcgctgttgacgggtcaacgcaatgattttgtccatcctctcattcctcccattaaaaatactgtattactatatcagaacaaatgtttgatttcaaattgtctatttaatccctttctggtaaaacatttaattacaaggagtgatattatttggatttagacatacagcccgtgaggttgagtttaaaagaatataaacaagttaaacaattatatatgcgcgcatttccgaaatatgagcgagaaccgtggacgtggctgctcatcaagagtaagtatcaacgcgctgactttatggccttttatgaccaggaacagtttgttggatttgcttacgttattcacagtcacggtatgcattatattttgtatctcgcagttaatgatcaaatccgttctcaaggatacgggacacggattattaatgaacttcgtcgcctttaccctgaggattcgctggctctggacgttgagcagcctaatcctcaagcggcaaataaccaacagcggttacgacgacttaaattttatcggcgcaatggctttttcccaactccaaagcttttcaaagaggaaaaagtcacttttcaagttttagcaaccaataaaaaaatcaaccaacgaaagattgataaggcctttgagtggttctcatggccgcttggttggctgattcaataaagattttgattttactagtttgaggctgttgaaaaagcttttttgctttttcagcagccttttttactgtcaagaaaataaggtttacaaaagtgttacaatttatgtaagcggatacataaagaagtgataacattggtagaaccattatttttaaagccagtctttcatgagaaaatttggggtggtcgacaccttgcaactgatttcggttaccaaatccagcgggaacaattggggagtactgggcaatttctggccatcctcatgggccaaatatcatcaccaatagtcaatacaaaggccaactattgccaaaagtttatcagcaacatcctgagctgtttggtaatccacgctcttctgtttttccattattaacaaagattcttgatgctaatgctagtctatcaattcaagttcatcccgacgatgcttacgccgaagaacatgagcacgaactaggtaaaacagagtgttggtatgtcattcatgcagaacctggagcttatttaacatacggccataccgcaaaaacgcgcgatgagcttattaagatgatcgataatcaccaatggtcaaaactttttagtagaaagccagtaaaaacaggggactttgtctatgtgccaagcggaactatccatgccttaaataaaggaattatcgtcttagaaacccagcaaagttctgataccacttatcggatctatgactatgaccgtcgagataaaaaacaggtcagctacgccagcttcatttaaaacaagcaaaagacgtgacaacagtgccatttactgagccacaaattaacccccgcatcgtccataatgatagttcaataattactactttaatttctcaacctgactcaccattctttaccgtctacaagtgggagatcaatgattaaaccagcttgacctggtaaagaaattgggcgctactgaaacaattaataacacggctgaagatcccgtcaaagcaattaaggaaatcgttccgcgtggtgtaacttatgcaatcgatactaccggaaacaccggtgtaattaagtcagcaattgatagtcttgccaccgctggagaatgtgtcctcttaggagtttgcggcgatattaccttaaacttaatgaatgatatcttatcagaatctaagaaaatctctggggttgtcgaaggagatagcaatccccaagagtttattcctcaactagttaagtactacaagcaaggcaagttcccccttgataagcttgttaagtactacgattttgctgatattaaccaagttatcgctgactcaacaaacggaaaggttattaagccaatcatcaaaattgatcctgaattagctaaataattaggtgaagtgtttttatgaaagtaatttttgtttgccttggtaatatttgccgctcaccaatggcggaagcaatgttcaaaaaaatggttgcagaagctggccttgctgatcaaattactattggttcagccggaacaagtaacattgcagaaggttcacctgctgatagtcgaacaaaagccattctcgataaatatcacattaaagacgacggaatgattgcccgtcaattgcaggacagggattattatgatgccgattatattatcgcaatggatcagatgaatgtccgggacgcaaaagatatggcaccagctgggttagaaaataaggttcatggaatctttaaagctaccccaggaaaagaaaattgctatatcgttgacccctggatcactcaccgattccaagatacctatgatagcttaagtgaagctctccccaattggcttgctaagctaaagaaggaaattaaataactgtttatcaaaaaacacgcctgaaaatttcagccgtgttttttctttttattggtaattaagatcgtcaaacttcttatcagcgttttgttgtgccatatcctttgattggtagtaaacagcatctacccaatttccggcacccccggctgatacaagaactttaacctgctttccatcgattgtttcggtcttaacagtatatgatgaaccgtcaccggcattttgaacccaaccacggatatttaaccatcgtgatccatccatgttaaagaaactggctttcccccagttcttagtagcgttttggattccttcgttagtatagttatcctcgtcttcaccccactcagaatcctgtttaaagagttgagttgttgtactgctattctcaccactgtaggtaaaggtatgaggaccaaatgttattgttgaatcagcatcattatctgccgaataccatgttccctgcatttcacttggaacatcaatagtaccactgcggccatacttatgatcattgccagaattactggtgcttgctgaggaattgctatccccactgcgcttatcgactacctgtgccttagcagctaagtcattaacgagctttccctgaccttcttgattaacataattggccatttctgactttgagattgtggcgagtttagtactcttttgattttccttgacattttggtagatgtttacatcatcgttattaacagtgtaaaccaagccctgtgactttccaccagcagtcacatcgtaagctactccttgtcctccatcactcaattggtatttagaacttgggtaaagatttacctgcaatccctctttttgcgcttctttagccatggcagcccaattcccaccataacgaaggccacaatacgtactaatcaaactaacagcttcttgggggctcatgttatcactattaactttcacattacttttagccactaataaactactgcttgaggcagatgaagaattagccgctttattgttagcctgatttccacaaccagctaataataggcccatccccgtaaccattaaaaatcctatttttttattcatattaatatactcctataaaaaaatgaggctggagaaaatttttgttttctccagcctcaactgtttttatgaacaatagtaagataacatggaaaataaccacaaggctcaagtcttagtacggacgataatcgccgtcttagcttagtccaccgccttgtcgagggggttatttcccacttgcatatttaactaagcccgtgacttgtagctaccatcagtagtgttgatgattaacttgtcaccattcttgataaatgcaggaacgttaacaactaaaccagtttccatcgtagcaggcttaccaccaccatcgatagtagcacccttaatcattggttcagtttcagcaacagttaattcaacagtagttggtaattcaacaccaatgatgtcgccgttaacaaagtttaagataaccttcatgttttcaacaaggtagttcttgtcgtcaccaagcaagtcatggtttaaactgtattgttcgtagctttcaaggtccataaatacggctgagtcaccttcatcataaaggtattgagcagaacgcttgtcaacgttaacttgttcaaccttttcagatggacgcatagtagtatggacaattgaacctgaacggaggtcttggatgtccatttgcattaaagtgttacccttaccaggcttgtggtggttgatttgaagaacctttaataacttaccgtcacgttcaaaaaccataccttttttcaaatcaattgtttgaatcatagtataaaaactccttcatataaaactgaactcttttaccgattaatgggactttgctttaaagcaagccttaatctttggcttcgttccgtgccgttaatcatagatagttaccatctataatttacattcactgtctattgtatcacattccctaatcacaacaatagcagttgttaggatgttttatcaataaaaaactgtctgcctatttcataattttcaatagacaaacagcttttttctttgatcgatacttctaaaccagctcaagatgtaattgcttttcaccgatgaatccagcgcgcttaagaacaaggtaaagagcaattgaaagaacagcgggtgctaccacgccgaaaaccatgtatgtgctgaactgagcccagccgcgtgataagtaagcaattggtgcaatcaaggagtttagtcccaatcctcctaaggtcgatgttgaacggaaatcaaacagaactgttgcaattggtgcacaaacagctgctgaaacaaccgttggaactaaaagataaggattgatgaggagattgggaaattgaactttaggggtaacaagtccttgggcgatatttgcgccaaggttattttgccgaaatgacatcgcagtaaaaccaacaaattgagcagtagtaccgatcaaggcagccgccgaagagatcggatcaagcatcaacgcaacggccaaggctgcagaagaggcaggcgtcatcagaaatagggcccacacaacggaaattaccattgatcctaaaactggtgaaacttgcatcgaatgcgcaatgtaggcggacacagcaagaagcgccggcgtaacaactgccgcaacgactagaccaaaaccgatccccacggctaacgcaccaaatggaacaagaaccatatcaagtggcgtctttccagttaaatacttaccgacaagaacagcaacaagtgccgctagaacagcagaaacaggttggccagtagtaagaaccggtgctcccgctgccgccgcagttacttgccctgttgcagtcattcctttaaccgccgtatcagtaaaatgaacaccatttgatccaacggtagccgctaccattgatgcaaatgtaactaatgtatttgtgttcatctgtgaagcaaccgcaaccccaatagcaggcgctaataatgcttgagcctcaccaccaattagggtaaggacatggatacctgtcaagttaccaattgtttgagttaataatcctcctcctagaacgaccaaaatagcattagccaccgccgcaaaaattcgataggccacttccttgacctttgatgaattttgataagttgcattagctttagaattgctaactcgattttccatcattaacgcctccttataatttgtttttgtttaatgattgttgttagtttatcggagcgaaaattaaaagtcaattatatttctcatttatttttaatttaaatcaagaaattgtttttattaaattctttacgatcgtcacatttaaagtaagcgcttttgtaaatgaattcttaagaaatcataaccacccgtcaaacgggtggcttgcacataggctataagccgataataaaagccggcgtctcaaggcgctggctttcgctttgctcaagccaaaatgctctgactactttgccaccgctttaagcggtgtttatactacctcacttacccttaaaagggtccgaatattccacacttgttagcttatccattgctatatcatgtttctcttgatctcggatatgcttctttatcgtggattcattcaatccaactgtacttatatagtagcattcagcccaaaaatgtcggttcccatatttatattttaagtttgcatgtcgatcaaacatcattaatgcacttttctcttttaagtatcccataaactactagacacttagcttcggcggaatacttactaacaagtgcacatgatctggcatcatatgaccttcaattatttctactctcttatatttgcacaataaacgaatataatctcttaggtctcttcagtattgattgaagatcgctttacgtctatactttggtatgaatacgatgtgatacttacataaccacttcgtataggctaagctatttaatttattagccatatttatataacctcttttcccttattgactttggcttgaacacctacatcttaaggcaaaagaggccttttttatataatttttatctcccacccgcatagcaggtggttttttgtttcgtgcactcgctctgctcgcgcactcaactaggtctaaagacattaataatcatagccaccatttgtggtagtagtggctgttgttgcaacaatcttattttcttgaattgcttcattggcaggggtgtcagcagtatttacattgaaagtaagaaaagcatttttattttcttcttcactattagttttatttacagaagaagcggaacttgaattttcagtagcctgagcagttgtagtcttttgttcactggttctagaagtgtcagtagtattagctacaatatttatcttcgtttcagcagtatctagggcagtctcatcccctgaattttgcggttgcgccgattcagctacaataccacctgcttgcgttgttgctggggtagtcgtatctgcttggacactagcatttactaccccagttggcccaaaagccaacataaaagtagcacaggcagtaatccactgtttcttcgccttatatagtttctaattcttatttttgggagtcatactccgtaaaggattatttttacccataagatctcccccgtctcttaatcatttatccatctataattataatccaatacaagttcttttaaattaattttttatcatcctattaatttaaaggtcaacaaaatttatccttggcattgttaagagcaaaattaataaaaaaacgaatggtcgctttacgcttaatcccatccgctaccacaatacattagtcattgcttttcgttgtttctttcggttgcttctttgcaaataagtgatacacgagtcgggcaaccagtgcttgtaaaacaatcgttactacgctttgtgcaagttttcttacccatttcataattttagctcccttacttaaatcatgccttgtagttaaacctaatcttctattactttaattatactcgtttcttattaatttgtttaatagaagtctttatcttaagattagataaaattattaattttcataataatcttcaattcatcaatataaacgcacaaaaagccctttttattcgataattgagaataaaaagggcttaaaattaccacaatgttgtcttttggctaattataattttattattaattttctagataatttaatggcttatcaacattcacctttgttccttgatactttttagcaatccattgttgaatttgcttattatggtaaagcttgactaacttcttatattctttattatcacggttcttcttagcagttgctaaaacattaatgttatccttcgtgctttgatcaactttttcgtgataaatagaatctttcaacacatttaaatgaccagttaaagcaatcgtattaccgattaatactaaatcagttgactttaatactcgtggtccggtggtatcatcaatttctttaaattgaaggttctttggattagccgcaatctcattggttccacttgttgccccaaagcccggcttcaattttatcaagcctgcactttgtaagagcaagagaccacgcgccgtgtttgctgggttattagcgatcgcaactgtggcaccatctggaatgtctttaacactcttatacttatctgaatataagcccattggttctaaataggtagttccaatcgccgctaattgtgctttcttattttccttattataagcttgcagatatgaccatgattggaaagcatttacgtcaatttcaccactagcagtcgctcggtttaaagctacgggatcagtaaagctcttgaccttaatcttcaaaccttcacttttggcctgtttactatttgcaatgtgttgccaaacctggacatctgggccaatcgttccaacagtaatctcatcgttgcgggtaaacccaccattagcgcccacactaagtccagctgcaactaaaatcactactacaataccaacaatccaccagccggtacgctttttctttctcatcataactacccctttacttttgttttcgctattcgtcataactagtcgcaatagccaacgggatccgacatgtcgttattctcgagaaatccttagtcagcgtttaccaaaattattattagtcaaccacgtggcgttcaaatggcttatctgaaatcccttcatcaagaatcttctttgaccattccttagcagagaataatgaatgatcacggtagttaccgcaagattcaatcgttgttccctgaacatcttcccacttagtcttgtaggcaatttcttcaagtgaggacttcaaggccttggcaacttcagtagttgagtgttcaccccacgtaattaagtggaaaccagtccggcagccaaatggggaacaatcaatcacgccatccaaacggtcgcgaagcaaaccagcaagtaagtgttcaatcgtatgtaaaccagcagttggaattgcattttcatttggttggactaaccgtaaatcatagttgctaatcttatctccctttaccccttcttcaacggtaattaaacgaacgtaaggtgccttaacctttgtgtgatctaatgtaaaactttcaactttagccataataaatctctccttttctgcctgatgagaatgaatcttggaactaaaaaatccctaggaacggcaatccaaccaattcctagggacgtttaatattcattaacgtgataccaccctaatttagccttatctcacaataagacccgcaagaagtacataaaaatactccagcacggtaacgggtgctaatcgcttgctgctaacacgtatgctcacagcatcagtctgctccaagaccatcttcattattcgttaccatactggttctcatctttcctagctctctgtaatggcattaaataattactcatcttttctaagcaatttctaatttaattgtaattataatatccttatccttactaattgtcaacacctatttcaaaattattcatgatataacgttcttaacgttttagcatcatttttagttattccgtttttgatgtttcgtgggatcatcacactatgctcatattctggagcgtgagccaatccaagggcatgtcccagttcatgttgggcaacctcacttcgaaattctttattagtataatctaactgattagggtccaaagttaaagttgccttatgcaaggtattcgtagtcggatcatattccgtccgggttgagccgagttcagatgttgtatagccaacaccattgtttcccgtattatttcgtgctagatcaccatcagccgcaataatattggccttatcttcgttcttagtccagcggatatgaactgctttcgtcttattccattttttgaccgcatcacgaaaagcccactttaattttggatcagcagtttccatgtaaatagtaatattctttttcttccacctaaatccttcaagcggtgtcggtgtattttctgggattcttagccgttctgcatttggtcgttggccgccattagaaaactgaaaatcattactatcagaagaatcctgactaaaaaatgatgattggaaaggttgggaaggcgcatctacatcagcatagacatgataatcgctaattccaaccgtccccacgactaagagtgctactaaaaatcgacgcatttaatcatccccattccataaagttagaaatgacaacacggttcgaggcgttcttgccagaaactaacaatccagttctgggagaaaaagccgatcaccgttccaatattaaaagcaaagattgcatgatttttaagagaacataacaagataatgataatgggcaaaataatattaaattacttcgtgaatttaagactggcgcggcgctttaaatagactgtcaacttatcatgcggttgaaaacaacaattacactgttgataaagggcatacccggcaaaggcaatcactaagccaagcaggttaaaaccaaagcgcagaaaaatgttcatcgtatcaattccccaaaatcgccataagttcgcaaatagttgcatgaaaatactgtacggaactaaaaatgttaactcccagccaaattctttaggagcaaattcgccaaccaaaagaatatgtagtcatcgctaaatatcccagcgtccaattatgttcttcttctaactctacaatcgcttcaagtaactctgcttgctcattataatatcgacttggctttcgattgagccatttgtaataaccatctcgcgaagaatcagctattttacacaactggctaattgaccatccattttcctgatttagttctttgatcgcttggtaccggagtcctttttcacctcccgattgcgtatttttgttaatttttttgcgaacgcaatctctatcttttgcttttctagctgagcccttaataagcgattttctgccttgagtcggtcaacttccgtccacttctcttctggcttagctttgcctcggcgatcacgaagtgattctgggtcattaccgcttttgcgatacttttgataccagccataaatctaatgcctcatctgtttgttgatattgttcaaccaatgagtttttaaattctttagagtagctttgattatgatgacttgcttgaagtcctggcattccctgatacttgtatagaagactccaccgcctgatagttttttggctaatcttgtatttaattattaccttatggattccatttcgtaaaacttcattgaggattaaaaatttttcctctgccgagtatttagattttcttcccatagaaaaagccctccataactacctcggttgtcttagaaaggatatattcctcatgactaatgatatcaacttttggaccggaatcaaggacccttacttaatcacctacactgttattctcggcgtaacttccaatatcactggttatccaatcaagaagtcgtcgaacggctacccgatttctctccagatctaagggttactatcaagacttaatagccacgattagtaaccgcagtcaggccttgttagatcagttaatcaagcggaataatttaccaagtgcgatgcgacgagttaagcgaacccttgccaagcaccgccaggagatcattgccagcttttacatccgactaaccaacgggcctatcgaaggcactaataataaaatcaagataatcaaacgaaccgcatatggctatcgtaacttcttccattttcggattaggattcttatttcgttgaagacttctaatctcatgattcgtgaattatcaaaaaagagaactagaccaaaagccaaagtagcttagtctagttctccaaattctcttcatccttaccgattgacaaagagccagggttcatggtatggtttaattatcaaaattaaaggaggtcatcatgatggctgataaggtaatgacgagggatgaactagcaaagtacaatggccaagctggtcaaccggcctacgtagcagttgaaggtgtaatctatgacgtctctgctaacccggcctggcagggtggccgccaccatggaaacttggccggtcaggacttgaccgacgttttgcttgaaaagtcaccccatggtaaacgggtattaaaggatctgccagtcgtcggtagacttgctgaatagaacaccaaaacagctgcggagggaaaatccacagctgttttttatataacaccgtttgtaaaattaagttagaaaaatagaaaggccatttgtggtagacttttgaatacccctaaacaaaagaaaggaaaccacaaacgagctgacaatcatcgcccattctttcgtgcaaaagcttaaagcgtaccgagtggcccaaatgatcaaccgttgtgccgaaaccgtttatcgcgtttatcgttacctggaaaccggtgcctcaattgctgattatcaagatcactatatgcgcaataagcaacgttgtggccgaaaacgtactcagttgtcactggctgaactcacttatatcaacgacaaaattgcccaggggtggacgcctgataccattattgggcgcgctgagcgcccaattagttgtaacctgcgaactctttaccggatgtttgaacgtggccagttcggcttcgatgtccgttccttgccgatgcgaggtaagcggcacccgaatggctatgtcgagcgcagcgggaaggctggccaattggggcaaagtattcacgagcgtgccaaggactttccgcactatgccactgaatttgggccccttgaagctgataccgtccaaggtaaaaagcaccaaggggcggtaataaccctgaccaaacgccaatcgaaggtcgaaattgtactcaatgtgcacgaaaagacggctgatgcgattaaccaacacttaagtcagtggcttcggaaattcccgcggcacttcttcaaatcgattacctttgacaacggaaaagaattcgccggctggcgcgagattgccaatcaatttgaccttcacacttactttgccgaggttggtgctcctaatcaacgagggctgaacgaaaacaacaacggtcttttacgccgggatggcttaacgaaacagctagatttccgcaatcttcctgatgaattggtaacccaactgatgagtaagcgaaataacctgccccgtaaatcactaggctatcgaactccatatgaagtattcatgtcttacgtcactgatgagcaactattttctttctaacttaaattgacatttcgggattttatcctccccaaacgtaattgaactactcccacttagctaaacctacggtttaattgcttgaagtgggagattctggaaacatcgcatacttaccctaccgattctgaacgaaccttcaagcagaggttacgactattagccaaggctcgtcccgagcctaactttatctatcggatagctaatcctttttgcaagatgacttgtgcagcgttaatatcacgatctaaatgtttaccacagtttggacaatcccactcacgtaccgctaaccattccgatttattcaatcctaaccgatgattattcttcccacaattagcacaaatttggctagtatatgacggattgacctgaataagctttttaccgtaccactcacacttatattgcaacatatctactaattttgaccagctagcgttagcgattgctctagctaaatggtgattcttcatcattcccttagtattaagtttttccaacacaatgatgtcgtactttttgaccaatttagtagtgaatttttgtagctgatccaaccgttggttggcaatcttttgtcgatacttcgccaccataatacgagctttctgataattcttaaaatcatctaattgccgtggaactaacactttattatgatgatcccaggcgatttcctgctgagcctttaagaaccgacgactacgcaatttctcccaacgatacaactttttatggtatttgtcttcaaaatgattgatcggttccttgcatccatctgaaagattaagtaatgacttaagtcctaaatcgccaccaatatatttacttgttttaggaagagtttggttttcgctttccactaaaacagtaatgtaatattgaccagcaacgttcagacgaacagtgacattcttaattttacccattggcaatcgaccagctctaaaatagacgataccgagttttggtaattttatatgatggcaatctaaaactttaatattgccattaacgtactttgaattgtagctctgagaatattttctggatttaaatcgagggaacttattttgacctttaaaaaagcgttgaaaagcatcggctaaattgcgattagcactttgcaaagcagttgattctgcttgtttcaaccaaggatactcaaccttaagttgtttcaacagattattcatcccaaaggcattcacaaatttagcttccggattattcttgcgccgttcaatttgcatattaagcatttgattccatacaaaacgaacacaaccgaaggtttgccagagctgatttcgttgtgctgaatttggatagatgcgcattttaacggcttttagaaccattattttctcccttgactttcaatatatcgttttacaacttctaaaggcgctccaccagtgctaattaagcaatagctttgtgtccaaaaggctgatttccaaagatattgcttgatttctggaaattgttttttgaccattctggagctagacgatttgtaagcatttaaaatttagccatttccgtatgaggcgttgctctaaacaaaacatgtacgtggtcctgatcatgattccattcttgcaaattaatgccgtatgcttgtcccacaactacaaaacgatgtttaagatattcagatatttcatcgttaattacttttcgacgatacttaaccaccattaccaaatggtaattaagtaagtatactgaatgctgatttctatctaattctattgttatcaccacattttatagatatatactaaatatatcatagaacaaaagaaaaagcactaacgcgctttaagagagcgattcatcccctacttatagaagtaggggtattctcgcaaatttatggataaagaccagaaagaatgcttcccttctttccagtctacctattaatcttcaacttttagcgtcgttcattgccttcatgatagaagattctttgaatgacaatccttgatcatttggatatcttcttcacttaattcaacagtgtatttagccatgatcttcctcactttacttaaaaaattacacccttactatatcacatcacaggagcagtgtctggcttaatcagtaaattaagatcattaattgacattcaactgagatttgctaagattaacattgaattgcataaacggggagcttgcagacaggctgagaggggactatgcgtctcgacccaatgaacctgatttggataatgccaacgtaggaaggattaataaaggacgaccaggatcaaagtgattactggtcgctttttactttgcactatcttaatcaaatcaaacttaaggatggtggaattatgcaacgacagacaacaattatcgaaaacagcatgatttggtgtggcgccgggatttcaattgctgaaatcctaactggaacttacttagctccccttggttttacaaaagggatcgccgtaattatccttggccacattatcggctgttttctgctctttttagctggaattattggcggtcagcaacgtcttagttcaatgaacgccgcaaaaattagttttggccaaaatggcagtaagttttttgccctattgaatgttctccaattgatcggttggaccggcatcatgatttatgatggtgcattagcagccaatgggggctggcaccttaatcaggcattatgggtcattttaatcggcgccctgattattggctggctgctcgtcggggttcggcacctttattaccttaaccttgcgaccatctcaacattattaattctaagcggtctcctatgcgccgccatttttacccaccattctaccagttcaccaactggtacattgtcatgggctcaggggatggagctagttatcgccatgccattatcgtggttgccacttattagtgattacaccagtgttgctcaacgacccgtgccaactagcgggattagtgcagttgtctatggcctgactagttgttggatggccttcatcggtttaggagctgctatccttactcatgacattaacatcgccacgattattttacgggccggcttgggaattgccggtttatttatcattattttttccacaatcacaacgacatttatggacgcttattctgctggtgtttcttcaaaaacgattttcagtaaatggtcaggaacaatggccgcaattggtgcaacaattctaggaacaattagtgcgttgattttccccatggacaacttcagtaattttctttaccttattggttctgtctttgccccaatgattgcaattcaaattacagattacttcatcttgaaagtagattatcgtaaacaaaattgtcaatggactaacctaattctctggttgattgggtttatcatctatcgaattctgctaaattattcatttccactcggcagtaccgttaccacaatcattatcatcatcgcaataacctggggtacacagcaagttcgcaatttggtcaaagtgaaataattatagttttcctactaagtaatagtattattaatgcaattacaaggaaggaattacttttatgaaaaaaatagttgctaaacaagtatcaatacttgaactcttctatgatttaatttttgtttatgcgatctctcgaataacaatgatgattcatcatccaatcgatggtagcttgccgccaagaatatatattgaatttatcattgtcgttatcttcgttttacaaatttagctttatcagacagtctatattaatcgctttggaacaagtcgggccgtcgatacggttggcttattgattagtatgtttgccgccatctatttagctaataatattaatactgaatggcggttaacatttcatgcgttcaatctttcggcagcactaacaactattaacttaatctttcaatatttatttggctctagcactcattttaaacgagatcatgatctccaaggatttattattgcgcttggcttagaatttattcttcttgtaaccgggctgattattggttatcagtatggtgtctatctctgcgttgccggtggtttaatcggctttttaatgcccttagtgatgtaccgcatgtttaggccggaacaagtcaactttccccacctcgtagaacgcctaagtttaataattatcattacgttcggagaaacacttgttaacattacccattactttaagggcgctatctattcaccattagcaatcgcaatctttctaggagtagctgccctattcggcgtctatacattgctagtagaacgcttcttaaatcatcatcagcatactcgcggctttattgcgatgtacactcatgtagtaatgattatcagcctactctcgattacgactaggattatctatatggctgatgaagaagtatcacgtttgtttcttagttgctttgtcgcatctaacctcatcgtcttctacctttgtctctggctttatagtttttataatcgccgccatttacgcgttaatggtcgagatcttagggcaatggcgatcgtccttttactaggatcacttggcattattttatgtcgcgaaaataacctaagtttgatgagcgcatttgcgttaaccaacgtggtcgaattcggcttgttggaatggaagctgcaaagaaaaaaagccctctaaggagcctcacaacaactattcatcacataattagttttcatccgcatttatattccatttatcctaataaccatttagggcagatggaatttttattcccgaaatgtcaatttaagttagaaaaaaagtagttgctcatcagtgacatacttcatgaatacctcgtaaggtgtttgatagcccaatgacttgcgaggaatgttgttccggtaactcattatttgagcaacttcttcatcagctaggtggcggagatcgcgacctttgtggagcccatcgcgccgcagaaggccgttgttgttctcgtttaacccccgttggttaggtgcccccacctcggcaaagtaggtctggaggtcaaattggttggcaattgctcgccagtcagcgaactccttcccattgtcgaaggtaatcgacttgaagaagtggggtggaaactttgccaaccattcctgtaagtgctggatcacactggtggccgttttactatggacgttaagaatcacttcgactttggaagtccgttctaccaaagtcataacggcgccctgatgtcctttgccctggacggtgtcggcttcaaggtggccgaattcacggttaaagttgggaaagtcgatagcccgttggtgaatgctttggccaagttgaccggccttccccgccgttctacgtaaccattggggcgacgcttgcctttcatcggcaaggtccgcacatcaaaattgccccgctcgaaaaggcggtaaagcgtccgcatactacagctgagtggctgttcagcgcgtcccataattgtgtctggcgtccagccttgagccactttggctttgatataagttacctcatcagtgggcaattgaatagccttccgaccgcaatgagccttgttttcacgatagtgttggtaatattcttggagcgtgtggccggcggccagaaagcgataaactcggtagacggtttctaagctccggtgcaaaagtttggcagcccggtaggcttttactccttggtcacgaaaattagcgatcatcgttagttcgtctatggtaagatgatggtaggtcatttgtggtgtcctttcttttgatgtatgggtattcaaaagtctaccacaaatggctttttatttttctaacttaattttacaaaccgcgattttaaattcagttcaaatcccatatgtttattgtcaattttgtcatcaatataaatcgtaccgcgttttataaaaccaatatcttggcctattttttgaacaggaatatttttgtaatgagtatcataacggaaattccttactccttgcaaatacccaaccgtaagtagattggagaagatatatttcccaaaaccttgaccattgtgggaaggaagggctgctaatcgatgaatgattgcatatggctcattttattttaaccacgatccatctttaatctcttcatacgtttgttccggggttagttgtaaggtagccgtcccaacaattttttgattatcaattagcacccagttatagccagctttaatatcattttccatcgttttctggaaaggatgaccatcttgccattgtggattacccttttcttttaattgtgctcgtgcctgttcaataattgtcatcacactttgaagatcatccaaagttgctcgtcgtaagtaaattgccattatcttttctccttaatcatctctcactcctaacaacaaaattctaatatattaatgtatggtcattttatcacgattaattattaaactgatggggctttagctaagtttaagtgttttgtcacagcgttttcattttaaggagggaatctcatatttatccatattgaactactcccacttagctaaacctacgatttaatgcttgaagtgggagattctggaaacatcgcatacttaccctaccgattctgaacgaaccttcaagcagaggttacgactattagccaaggctcgtcccgagcctaactttatctatcgatagctaatcctttttgcaagatgacttgtgcagcgttaatatcacgatctaaatgtttaccacagtttggacaatcccactcacgtaccgctaaccattccgatttattcaatcctaaccgatgattattcttcccacaattagcacaaatttggctagtatatgacgggttgacctgaataagctttttaccgtaccagtcacacttatattgcaacatatctactaattttgaccagctagcgttagcgattgctctagctaaatggtgattcttcatcattcccttagtattaagtttttccaacacaatgatgtcgtactttttgaccaatttagtagtgaatttttgtagctgatccaaccgttggttggcaatcttttgccgatacttcgccaccataatacgagctttctgataattcttaaaatcgtctaattgccgtggaactaacactttattatgatgatcccaggcgatttcctgctgggcctttaagaaccgacgactacgcaatttctcccaacgatacaactttttacggtatttgtcttcaaaatgattgatcggctccttgcatccatctgaaagattaagtaatgacttaagtcctaaatcgccaccaatatatttacttgttttaggaagagtttggttttcgctttccactaaaacagtaatgtaatattgaccagcaacgttcagacgaacagtgacattcttaattttacccattggcaatcgaccagctctaaaatagacgataccgagttttggtaactttatatgatggcaatctaaaactttaatattgccattaacgtactttgaattgtagctctgagaatattttctggatttaaatcgagggaacttattttgacctttaaaaaagcgttgaaaagcatcggctaaattgcgattagcactttgcaaagcagttgattctgcttgtttcaaccaaggatactcaaccttaagttgtttcaacagattattcatcccaaaggcattcacaaatttagcttccggattattcttgcgccgttcaatttgcatattaagcatttgattccatacaaaacgaacacaaccgaaggtttgccagagctgatttcgttgtgctgaatttggatagatgcgcattttaacggcttttagaaccattattttctcccttgactttcaatatatcgttttacaacttctaaaggcgctccaccagtgctaattaagcaatagctttgtgtccaaaaggctgattcccaaagatattgcttgatttctggaaattgttttttgaccattctggagctagacgatttgtaagcatttaaaaatttagccatttccgtatgaggcgttgctctaaacaaaacatgtacgtggtcctgatcatgattccattcttgcaaattaatgccgtatgcttgtttcacaactacaaaacgatgtttaagatattcagatatttcatcgttaattacttttcgacgatacttaatcaccattaccaaatggtaattaagtaagtatactgaatgctgatttttatctaattctattgttatcaccacattttatagatatatactaaatatatcatagaacaaaagaaaaagcactaacgtgctttaagagagcgattcatcccctacttatagaagtgggggtattctcgcaaatttatggataaaattaaagaacaaacagcaacaggtttaaccgaattattggatcaagctcagttagaaaaagatgacctcgtagtgttatgtctttcaactagtgaagtccatggcggaataatcggaaaggactctaacattgagattgcctgggcgattgtttcgacagttgttaatatcttacgaaaacaccaactccatttagcagtccaaagttgcgagtaccttaatcgggcacttgttgtcgaacgaaatgtagctaaggagcgcggctttgagcaagttactgtcttcccttcgctccatgcaggtggtgcaggacaaattgctgcttttgaaaactttaacgattcgattgaagttgaacacattactgctgaagccgacatggacatcggtgatacctcggttggcatgcatgttaagtttgtccaagttccagttcgcacttcgataaaacaaatcggactggctcatacgacttatctccgcaaccgaccaaaattgattggtggtgcgcgcgcaaaatacgaatgggatccgtttgacaataaataattttaattatgaggctgcgagaaaactttttcaacagcctctttttttatacgaatcttgttacgatatcgtggaaatccttgtagactagctttgcattgtagccatccttgcgggagtgggactaaaaactcgcaagcaagtttaattctattccctttttcgttcaattatttaactttccgattacccaattcccaaaaagcgagggccgaggcagccgccacatttaaggaatcaacgcctgtagccatcgggatcttaattgtaaaatcactctgcgtaattgtattttctcttaatcccggcccctctgaaccaaggataatggctaatctatccaccttagctaactgaggatcatcaatatcaaccgtgttatgacggagcgccatcgcggctgttttgtagccagctcgatgaagaagatcaactccttctgactgccaaactttagcatcaacataggtccacggtacttgaaaaaccgttcccatagctacccgtgaggcccggcgataaaggggatcagctgagttgctcgttacaattaccccatcaattccgagagctgcggctgagcgaaaaatcgccccaatgttggtgggattaacaacactttccaggattgcgatacgcggatggtcactgggcatagtagccaaaaaattatttagacttggccgttcgacgcggtacatagctgctaatgctcctcgtaaaagattataaccaccaccagccaactgccgaagtaatttactattaactacataaattggcgtttgttctaatcccctagtttggttaattgccatctcatgatccaaatcagccaagtcacgctctagttccttttcttctattaaaagagatgctggccgataacctgctcgtaaagctcgttcaatcactttgggactttccgcaataaataaacccggattaggttcaagagcatgaaaaagttgtgcttcattaagtcgcatataaggatctaaatctgatcctgtaagatctgtaagaaaaattaaattatgcatattaaatttaccttatcttaaaaactgaattagtttagtatactcttattttcgacctttttcatgacggttattttataacgagtttcgtttgccgatcgggtaataaaatcacgttgaatcaaaagagaaacaatcattgctaaagcatcaataattatgaaaacaattaaggtgacatagtaattgtggagaacttggtgtgtgtaagaaagaagaaggggtcccaccatcccagcaattgcccaggcagttaagatatagccatgaatagctccaagttcttttgtcccaaaaacgtcaccgagatatgccggaatcacagagaatcccgccccataacaagacattaataagcacaacgctaatgcaaagataaatggcgccttaaataaaagaagaacaaagagcatcacaatatcaagaacaaaaatcaaactataggtaagtggccggccaataaaatctgataaagttgcccaagctagacgaccaaaaccattaaatagaccaatgataccaaccattacggcagccgcactcgctgtcattgtcgtcatgtcctgggccattggtgaagcagctgaaactagcccaattccggtagtgatattaataaaaaacataaaccataggaaggcaaatgtccgtgtccgcaaagcctgattagcagttaattcgcgaccagtcaaacttatccgttcagcattcttagcaatcgctggagggagttcatgtgatcgtggcttcttgataaattgggcagcaaccagcattacaacaaaataaaagcctccgagaatgtagaaggtatttacaacgccaacgttcgccattaaactttgcgcaattggccccgtaagcatcgctgcaaaaccaaagcccataattgctaaaccagtagctagtccccgcttatcgggaaaccaacgcacgatagtagaaaccggggttacatatcctgaccctaatcctaagccacctattactccatatgcgacatataataaccataattgatgagactgaatcgctaatcccgttaaggcaatcccactcccatagcaaatacttgaaatagttccagtaactgttggcccaaatttttctactaaacgccccataaaggcagctgacatccccaaacaaaagatagctaagctaaatgcaaacgatactgaagtttccttccagcctgtatatccagagattggtttggtaaacacactccatgcatagacactaccaatcatcaaatgcaaaattactcctgcaatagctactccataacgatttcttgttttcggcatcttcactactccttctctacataatttacgaactttatcataaattaagctctataagttcgtctatttaaaaatatcatagagcaactaacttatcaataagaaaaaaacgaacaatctaatttagcgatagcatttattactgcttgaaacttacctttaatagcaaaaaacacccagcttttacactggatgtttctcattggcaaatatgttgtttttaattgagttgacttagttttaaaactaccaaagtaccatcatatcgcagttccaactctaagttacattatataattctattcgtactcttttgtagagggccttgatatatcagtacttcaaccgtgatttagcttatacggtagaaaaccggtagacaactcgtattacaatgccacaaattgattaccattgaaatcaactaaagagtgattaggatattcaattttccctattgctccattcagctggtcagcaacagttcgattacgaccacgccataactgtgaataatacttaagtgttgtggtcggcttagcatgccctaaccgttgagatacagctaaaatatcaacattgtatttattaattaacaaacaagcatgtgacgtccgtaattctttagcctgaatacggtgaactcctgctaaatcagcatatcgattaacaatattattaacggttgaacgatgtaatggttcatcagtggcactcagtacataatgatcatcaccctgttgcggtaaattatcatactgtaactttttccaccactttaaaagatccacaaggtcagttggaatatcaatggtccgcatccccgcagtagtcttagtataattcttgcgttttttatctgggtctttagtattcgtcaaagtatgactaaccttaatatacccatcagctaaattaatatctgaccaccacaatgcaagtgcctcggaaacacgcattcctgtgaaatagtaaagattgagcatcacgtaagctaaggcaccttcaatatcaccaatataacactttgagataactttcttgaattcttcaagcgtctaatagtgaataatgtggtggcctttggaaatcgctcccgttgccttcttaatcctagaaggattttgagttaagtaatcaagctcaactgcactatctagcacttccctaaacaggccatataccaacgaggcatacgattgcgaatagcccttctcatctgagagtaaccaatttctaaactgtaaacaatccactggctggatttgcttcagtttcttgttaccaaaccactttaaaatcatctcaagaactggttcacgagacaaccaagtgctttcttcaacatttccacgataagttggcttaaacactttattgtagaaatctaataacttaacgttaccggactgcgttggaaaaccatttttactgtactcatcgcggatacgctcagcttctaaatgagcatcacgcaaggttttaaaacgattaccatttttatcccgacgtgccttcttgattatcttttttccagttaaaggatctaagcctagataaacgctaatataaatatatccttgttcgccatttcgaggaggctgccgatacactgattaatatttagtctttgccatcagcgtcatcctcctcaagaggaactcccaaaacgacttcttctatgatagcacgaggtgcaacttgcaagcgaggattaccccaaaaagtttttccccgtttaaccatgacctgacgagtatcatgaagaatcgtttttgcttgattaggcttaaagcccatagctatcaactcattctttgaaaccgttgctttcattgattaccaccaactttctgagatggtgtataatatgggcgacaatgatttggtagaattattgtggatggctttgcaatgctttggtcggctgcaaagtcttttttattctgtaaataggctaaaattagcgattgcctcataggacttcgtaactcaaacaagtgaacgtactgatgattacttacgttatgttgtttcttataatgttcaagaagcagaataggtaagtacttactaggatttccattccagatcatacaatatcgaatcgctcgataataaagatgaggatacatgcttcgccaagtaacacctattagctcatgaatcgaaacatcgttgcaattttgttcgcaatattgatcaatcaacgtatcaatacattgaaaatagaattcaaaaacattcaattaagctcacttcttttaataaaataagcttgattcaaagagtaagtagcgctctccataatctagaatataaaagcgcttaaactcttctttagtaacgcccagttcttcacgctcctgatcaatctctttttgacttagataattattcggttgtccgttaaattttaagccagctggtcccaatttctgatagaaattcaattgagtatcactaccaaccagcttcagcatctggtcgccagcgtagttcatgaacatgtcatcagcataaatgcgtgatagtcgacgcaatagcaataaccgttcaccagctggcttatttttgaaataatttacatgattattctgattcttcattaagtcattccaaaacttatcgctagaccgtgtttctttaatagcagtgaatagccaacgtcgctcagataaggtcatgttaaagaaagtctggtaatttttattttaagaattgattgtattttttcataaaaaaataccccctacattttcgtaggaagtatttttagtcaaccataccagttgacagatatccaaattaatgctttgcaaagaagtcgcggtagacgtccgggaccacccggtcggccgcttgccattgggcctggagccggttttccagttggtcgcccggggcaaagaccgcctgcaagtccgccaccatttggtcgacttgtgctggttggtaacggttgaccggggccacgtagcgcggcgcgtgcagcgtttcttcaaagcccatgatcaacatgttgttttcaaaggcgccccgcacggcatcgaggatttcgttgccacggttgatgtctaaatagacgtcggcgtgggccaccagtttccgcaccgtcttagttgcgacagttggatagaggtcaacgttagcgtagtggtccaaactcatcagcttgctggacatttccgtcaccgccgctatcgcgaagtggaagtccggcaagcccttgatcagactttcaatttccaccaactgatcagaattagtcaggatcaagatttccttgcgttccttgttgagtcgttggaacggataagcgtaaccaaggtagctcagctggacttgctgctgcggctggtcggctaccaaacggcgcaagttgtcgtaagcggccttggtctggacaacaatttcggcgttaggcccgaggttgccgtttaaaataaaatgcatgttgcccggaatcgcatcttggagcggttcttgccagaagagacgcgggtgcttaacggctgccccgagcttctggacgacaaacagcggcgtggacagggagttaaagttaatttggcgaatatccaggtccgcttgctgcaggtagtaagcaatgatctcagtctgattgttgaagaatcgtggctggccgttaggttggtagtagaccagttggccggtcaggtggttagagacgacaatttcttgaccggcccgggtcaggtaggtggtcagcgtcgggtgaccggcttcatcgtagtcggtcacggcgtgcttgaagccccattgattgtagtgatcaaccacccggactcggccgttgcggtcaaaccattccaccgtcttgaccggtcgggagttatcggtcgtggcaaaggtaatccgcccccgttggatccccatgtccattagcttgccaccgctgctgttagcttcaatcgcccagtagcgcggcaaatcaatctggttaaagtagcgcggtttgccgactaattcttccccggccagctgtaggtagtacttcagcggggaagtcacgtcgtcaggcaagaaaccatcatcgtgcaagacgaccgtcgggtacttttggccagccaccaactgggaaaattgcaggtctttgctttcgactgtgtagaaatcaaataaattaatcatccgcttgcacctctttcaacaattgggcccacttggcctcaatttctggttccaagtagtccgccgccaggtcataggacacttgttccgcccgttctaagtctaatttagcaaacagggctgctaacgtcgtcgtcaaagcgtggatcgcttgctcgcccgtttcgccgatttcgtacggaatcaaataaccattttcgtcgttgcgaataaaggtctgatttccatagcggacgtcaaagccaatcatcgccagtccggaacccacagcttcaagcaaggtcagcccaaagccctcactggtggaagccgaaatgtaggcttggtagccttgataaacatccgttaagttctggtgtccctttaagtggatgtaatcttccgcttgcccgtccttaatcagctgttgcaacttggcccgttcgcccccttccccataaatatcaagggtcaattgcgggaattgggccttggcggccatcacggcttggactacccaatcgaggtgcttttcccctgccaaccgcgaagccgtgatcagactaaacggccgccgcggcgtggttgggtgctttaattccagcaaactgccgaccggaatcgtaaagatttgcgggtgggcctggttgtacttagcaaattgggccgccaacagctcggtctggacctgggtggacgtgacgtagaaatcaatgtcgcggtggtgctggaagacatactcgtagtagttgttccacaagatatgatcatcattggtgttattgacgctaaagtgctcagcgtgcacgacgctgccgaccttggctggccccttgtgggctaagatttgttgagccatcccggtcccccggtcgacgataatcacgtcccccttctgcaaggccaaccgttccaaaaaggcggtgatcaattcttccttggacaataacagttgacccggcaggcggaaagtcgcgttatcaccggtcggtaattcttccatcgccacggagccgtcctcattaaagaagcgccgcaccatcagcttggccttaccatcgatcggggcgtaatattcgctcatgtagcggccgtagctaaagaaatcgcggtgaaagaggttgccgctgcgcacgtattcggcccgcaggacttgctcactgccagcgcaccgtaaaatggcccgcacgtagtattgatcattaaagatgtacgtcaccatgttgccttggcgttccactttcgttggttgctcggcaaaggtcgcggttaaatcggccaaagtgtaggtcgtcggcgcaattttaaagtcactaaaggcttggtagagccagatgacttcttcatctttaaagcccaggttggcggtatagtgctcaatattttgggccgaaataaaatcagtaaagataaattttgcatccacccctaagtgatggaagacttgggcccggtaagcctgggcgtattcgaccccgctgctggcccagccgattccttggttaaaattataaacagtcatcataactcctcatttcactacttgatccatcacaactggcgcttggcgcaaaggttcaacgtcaaacccctagttgctgagttggccctaacgcaagacgctcatcaacgaaataatgacccccataatgacggagagggcaatcaaaaacatcaatttttgttggaggttaaaagctttttcttttttctgcttcgtgggcttgaattgctccttggctaaccggttggcgatgtcgctggtcaacgggtcgtcatgcttttcgtgctcatgcattggtttttccctcgcttcctagacaaagtaaatctgcttttcaccctttttgttgacgtcgatcgtactcatcaacaagtggcgggtaatccggtgatacaagtcgtggcgcatggcgttatatgaacgcagggcttccttgtgatattcatacaagggattccgctgggccgtcgaccggctggtcacaatcgtttgcaattgggacagcccatcgatttcttccacccagcactcatcaattgcttttagcaccacaatccggtaaaaatcattttcttccttggtgtccgcaaaagtggcctgcttgcggcctaactccgcgcgggcaatgttcatcaggtagtcgacgaccgtggtttgatcagttaggtctaacgtggtcggccgtgcaaagtactgataagtcacgttatctaaaatatagcgtaccagttgatcgaccgttaaagccgggtgggtggtaaagaagcgggtaaactcagcttgcaaaatcgcggctaaatccaaatcgacttgctgatgatacaagagccggttgcgctcgccaatgatcaactgccgctgaatctgagcgctttcgtccatttccaaggacttgcgccgctgctggcggtcggcactatcactggcttcttgggcctgggcaattgcgcggcggaacttccgggtagtaatctcctcggggtgggccggatcagtttgccgtcggcgcttcttatagtacttctgcaaccagcgggccccgtgcttgattacgacttggtcttccaaggaaacgtaaaattggctggtgcccggatccccctgccggcccgcccggccctggagctgctggtcaatccgcttgctggccattttttcggtcccaatcacggctaaaccacccaactccttaacgccgggccccagcttaatgtccgtcccccggccggccatggtggttgcgaccgtcactgcccctttttggccggcttcagcaatgatcgccgcttctttggcggcatttttagcattcaagacactgtgggggattttttgttgcaagagcaattccgaataaatttccgaaacttccacgttggccgtcaccaagagaatcggccggccactttcgtgcagccgcagaacttcttggagggaagccattaacttttccggcagggtggtatagaccttgtcgggcaaatcaacccgcgccaccgggcggttagtcggaatttgaatgacccgatcgtaataggtctccagaaattccttttcggccactttccccgtcccggtcatccccgccagcttcttaaacttacggaaaagattttggtaagtaatcgaagccagggtccgggtatcgggcgaaattttaacctgttccttcatctcgattgcttggtgttgtcctgcttgcagtttcattccttccatcacccgaccgttggcccgatccaaaaggtctacttcgccatcttgactgacaatataatctttatctttttcaaagagccggtgagcctttaaagctaagtttgttgctcgtaataattcagtgtgatgaccattgaataaattcttaaccgcaaagtagcggctcatttttttataacctaggtcagtaaaccaaactgcattttcctccttatcatatttgtactcttccccttccttaagggtgtagatgaattcatctgctactcccaaccaagttgattgtacccgcggtgaacctgaaatcaccaacggcatcaccgcgctgtccaacaaaacagcatctgcttcatcgacaatcgcataattaaaatcacgcataaatttattttccacactagttgctaaattatcaaatagataatcaaaacctagtgttgcattagtagtataagtaatatctgccgcataggcactccgcttatcttcgttggtaaactctttcgatcccggcgcagcaaaaccaactttacaattcaaccctagccattcataaactttccccatttcagtgccatcccggtaagccaggtattcattcggagtcaccagcatcgcccctttgccgcttaagccgtttaaatacaagggcatcgtcgccgttaaggtcttgccttcgcccgttttcatttccacgatattaccctggtgcagggcaatgccacccatcacctgcacatcgtacgggtacatccccagcacccgccgatcagcttcgcgcactaccgcaaaggcttccactaacaagctatctagggagtgtccgtcttttaactgctgcttaaatttccgcgtataatccttcagttgaccatcactcaaggccgccatctgcggtgccaactgattaatttgtttggtaatccggcgcagcttttttaatcggacccggtttaataatggcttcttcattactctttatcttccttttttattaatttctgcctactaatccagatattgattcaccacattaatacgacgttcttgttgaatggcattgtaaattaattgctgttcataattgacgatagcgctcaaactctcgtcaacgattgcatcttccacgtcttcgtcatcatcttctgctttagctatttttacctgttcagctacctggtcagtcacatcagttaaatctagtcggtggaaaattatctctgtgcagccagcgctaaccagctcaacagcataaaagtaagcggtcggttcaaaagtaaagatcccactatcttgacgtatgattgccatcttcaccagcttgccttcataattaaacatcaagactcgcaagtataatccctgctcgtaattgctttcggctactaagtggagctggtattgatgattgtgttctaaaagtggcaactggggtaccgcatgggcagttgcaaagttaaatagttcatcccagtggtaaatagttgagccagtcggtaaaaagggattccgtaactgaacatggtcctgggccaaaaatttaatgcgcgttccatgtaggtaagcatgagtcgccgattgaacagcactaccataatacttgtcggactgataaatctctccccgcgcagcgcctaaaccaacgtaaaacagatctgctggtgacttaatgtagatactttgcatcattgcttcctccggtcaaaatcccgttccatcattgtccagtattgcttttttaaccaggctgccgtttcatacccagcatcattatggtgtccatctagcccccgaccaataacataaggatgtttgccagtttgggctaagtgaactaacaaatcatgatacgccttattatcgtagtcatcttggcgcatataagttaacatcaattgggtttggttgagatcggtctggtcaaatttagaccagaaacgttcgttcatcgtcttaaccatctgtttgcggccagccaactgtgctttccgcgtagtatatttattaattatatctaaagaagttgcaaagccaccataacgaacagattgctcacactgagcaacgtttccaagatttaccaatggtttcccaacaatgatactatgcgcccccagctgactaccataatatagagcaccaaaggttccagctgataagccggaagtattaagctgatgatgatcaaatcctaaccaagccagggttttcaagatccgctctttaatctgagtttcaaactctggactccccaaataaaaggctgtcccttcgatccgtgggtcagcaaatagtaaaaatggtgccccgaatgaacgcatcatataaaaggcttcaaatccctcggccgtccggtacccagaaaagtaaacatttaacggcggtttaaggtcaccagggttaaagtagtaattaacttccgtccgatcgtgatcgataagtcgtcccccacccggcaagaattcccccatttcatagcgtgaccaacggaggtgaacattacctaaagatagccatccttgtcctttagcctcaaaggtaatacaaagacttcctcccggaatcgtatcataaactggcacttgctccgtcatatctttttcagtaaaaactaagcgtttagaaaaagtatacggatttcccggtggtgcttcataaactaccattcgtagcttaacttcctcactatgagaatactcactccaaagcttaagtaatcttcctcgatcaatataaccaccaaaacgataagttcctactggttgatagtcagtgccaaagtcgccagtcaattcgaccgccagaaagccattaaactctaagctaccacgataatttggtgccggttcaaacattgaaggatcaagttttgcccccccttgcccctcaaacagacgagtttgcaaccatttcacaatttgatcccactcagttagtggtaaaggccgaaccactttcgccttaaaatagtcggtttgtaatggcgtttttagttcttttaggaccgcaggggcgcaagtaacacgataactgtcaacatacttgaacagagcttgtaaatctacatctgtcgggcaagctgcaaagtaagcccccacgaaattttgaacccgtggcttttcgacttcgacaactggcttttttttctttaactggttagtcgcctctttcgtcactggcttttttgaagataattttggcttaggatttaaatcagctaacaaggatgacactgcccctggtgcggcataatgccactgatgatctttgtcggcaggtaactgtgctgttaaatcatttggcccaattaataagtaatgttccactttactcctccgcctttttcaatgcaacttgaaaccgcttgacaatccgaccactagtatagtccgcaattttattggctgcatggaccagcgccacgttccaatttttcaagccatctaaataaaagtgtaaggatggcccaagctcattttcaacatcatcaatgcggcgcccattcttcccttcctccacataaagcgattcagcccttaaaatttcagggatcccggcactaatcccggcaatctgtaaaaatacatctggttgagcagctaaatcaattatgatacgagtagtatgaatggcttgaattaaatctggttcagaatttacaacgaccaaatgaatatcacgcttacgttcattattacgtgcagcatcaaggtcatcagcaagttggttttcggccttagaagcttgtacttggttaaaagtatattcatcttcaagatccaagtttttgtctaattccgctactaaacccgcgatttcatcctgacgttgaaaatcctggaaagtaaggagcgttaaatcaatcaattcattttcattcatcatagtcatgataatccgtaaacttttacgtaggagaattggatctactccgtcaatagcgaacataattttcaaaagccgctcctggttgctgatgccaagacttaatcttgtatccaaaggtggcagttgtaacacctgagcaccaaccttcgtcagctgctctcgattataattagaatcagcgatcgttaagactgcacgctgtgccatctcagcttcaatctgttcttctaaattagcccgattaccaaagtaagacaacactacttgatcattgggaagcacatccattagcatttgatcatgaaatggatcggcagcagcgattatgacatctttagaatgaatttgttgctgactaaatagagtgaactgctcgataattaaactcctcaggttcggatagaccccctgatgctgagcaaggtgagtgcctccaacaatatgaactttcccgtcagatgccacgtagaattgttcattaccgttactatccaagtaagcctggcgttggcactgttgctgatcatcatattcgctgactcgcgaaacaaagccgcgatcgtcaaagtccagcttccgataaaggcggtcatctttaaaaagatccatcatgattagattgccttccggtcccattgaaagctgagcataacgttgggcatggctaaagacagtcacggtaaaggggttgtagacgtaattggcgtcagcaggccaggtaaagtcgtggtaatcaaggttgaccaccgataaatcggccggaatcccctgtaagtagtcaaagaccgccaagcgcggcacttcgtaaatcccctgctggtaggcaaagtgacggagattaggaaagtacaccggaaccagtaaggcggccgtttgctcgcttcgagtaaacatccgaacctggttgatcgtatcgtcaaagccgtgctggttctggcggaaccaaatttgttcgcgactgtcccaggattgatcgccccggtaccaagcgggtaaaaagtaatacatcccttctacacctcctttgcgtggtcaaatagcggccgatactgcttgcgaatcgataagatattgatctgatcgatcatccccatcgaaaaaccaacgatcatcaagacgtagcccggcaacatatagatccccaattgtccggggtggctgacaatcatcaacattggcatcccagcaaagataacattgtaaacaccgcccacgaccccaaataagagggtaatcaggttgatccgccgctcagtcgccttacccggccgtacgcccagcaggtagtcgccggagcgctgaaaggccttggcctgctgttcggcattaacgttaaccagcgcaaaggccaaggacaggataaacagcagactgatgtagaggatgattcccggcaacttggtaaagccaaaactggtcgccccccaagccaaccagtaattttggggataaaaggtcaataagaataaacaaaagtaagtgggcagtgtaatcatcgacatggcaaacatgatcggcatcccgccggcggggttaatttaattggcaaatacgaacgcgaagcataattgttatcaatcataagacgcaccaagggcaaacggtattccccccggtcagccataacattgaggtaagcaaaaaggaccatgatgatgaccagggcggcgaccaccaccattagacgggtcgtggaatgatcggctaacatcaaaatccccgctaatcccgttttcatcgcactctgcaaaatattggccagtaccaagagggtcagcccaccaatccctaacagggcgttcatatttgacagccacatgataaacatcgtcccggtcgtcatggtcagcaggaccgcccctttcgccgcccagcccgtctgggtcaattgcatggaactgaccaggacaaagccttgaattaccgttagtagtaaggtaatctctttgcttatccaatccttgcgccgctcagataagcgatccatgccaaaccctcgtccctgagtcaataaattggcgatgatcatcgccgacatccacggtgaaagccccaaactaaagagcgaaagctgggttaggtccccccagtcgccaggctggccacgtgcaaactggcattttttaccaccaacgatttggcatcagtatatggaagaggaatcgacttccctaaaatgaagataaagacaaacaataccgaccagcaagccttatgaaagaccgggtgattgaatttccatttttgccaagtgtgcaccgcacttcccccatttcatcgaacaatgtttgccactcagattctagctgttttataatacaatttcaataatgcaataatcaaaatagcgatcatatttatatgtttgctaaaaaaacagcatcgataagggcgcgcttggtaaagaatccatctcgaatcatatttcctatgcgattagcatttctcgataatgtggcatactgttcatcactaatttctttcactttttccgctgcttcctctaaattagcaacacagtaaccaatgtgatgctcatcaatgaattcactttgcgccaaattatttttaacaacgactggtattccggacgctaagtacgtactcaattttgatggagcatccattgtcatatattgctctgtataaggatcatctgtccaaactaagccaaacccaccgtttcgttgcaaactttccagaagtaaaggatcaattttataccctatagcttcaacgttttgattatctatttttgcgtcagtataaacttttaatttcacttttaatttcacatcgtaattccaacttttaataaaggtaaacttatcaggatttccggcaaaactaattgtatgagaatttttgggagagataaatggggatatcatacctgggtggtcccaaaattgctgataaatcactggaatatcttcttttaagccatcttgccttaaacgttcaatcaatttaacagacggagcaatcagtacatctgctttattgaaatattgaatgtacttaggcatcaaatacaggttcgcttcaaacattaagggaagaacgtcttctataaaaatgacttttttcaccccgttatacagtgagaccctatcaactaatccgatatcccaatcaatcgaattccaacttggcgcctgaaagattacagtatcgttatttgctaatccggctaacatcccatcaaaccgtccgtttcttacttcgattggttcatcaggccaatcataaaaatacattggaatctctttaaagtgtaaatcatgacacgcgatctctgctaccgtattttgagcttgttgtgctgtatttacgtagttaaggccatggatgtttgtaataaagactgtcattttaacctcacttaatactgtatagcttcacctttatctccattcaagattactaatcatttcaaaagctgccctcttaattggaaagttttgcctaatcaaattaccaatctggtgagttctctcgagcatttgatcatactgttcttttgttattgacctcatagctacctctagctttgataaatcacctaatgccaaaccaatcccatgctctttaacaaattccgctaatgctgattgcttagcaactattattggttcgtcagcagccaaatacatagctgctttgtaaggagaattatacttttcatactccccgctccatcctgttatttgaggataactggtagaggcccaacatagtccaaagctcccagatagaatgctaggaattgcttcatgatcataatttcctcgataattaatgttagggtagctattcgtcgttaaatcatgcaagacattgtcggtctccacttcccgtccaaaaacgttaactgcaatggatgatggaatccccagtaaaaatcctgctttagtcaggttacctgcgaaatcgatttctaatttcaaagggcgtttccaatccattgaattcttttttgctgaatatccaaatacatccagatagacaaaactattactgtactctagtccggcaaaatcaaaatccccctgcaaacgttccgccatttgatgattatgaacgattaacccatccatttttgataaaaagtaatgttcaacaaacgaattactatgatgatctgtcaacatttcccgtgcttctttaactgatttttttccttgccatgaagtaatatcatgaataatcgctacacatttggcaccaatttgattatgaaggtaatctatcaaatagccagtgtatgcgtttgaattgtgcaccggaaattgaaggaaaacaatatcatctttctttatccccgccagttgaccatcaagccttgtttgtagtgaactggcaggttcctcatcccaaaaataaatgtaatagtctaaagtacgtgcattcaacgcttgtactaaactctctgttacttcatattgcggccgaccaaaagccgtattatcccaatatgggacaccattttcgcggctaccattactgctcataacccaataattcataatttgcacatctccatatatagataataatgatcttttagtagaaactcaaattgtagagtgttttacctctagtgatgcctaaacaagatatcaactaaattgatacgttagttatattttttcaaaaactatgactctatttgatcccaatagattggcatgacagccgttgtactactaaaaacgtacatataaaggtcacgcacagctgcaatcaaccgatcactggttgcatctaactggttaaatagttgatctacgctctcgtaaagaatcgtgtcgttatccaaatacaacacatgctcatagtcagctaacaccactggcaaaaaaattcgttgtaagtacaaaagattaacgtgatcttttacttgcgctactaattctgatggtagttccaccaaggcatgcggtttgacgtggacgtgcggttcaccaactaccgtgggtaattttgctaggaccttcaaatcttctgtaaccacctgttcgttgaaaatgtaaatgtctaaatcctcaattgacagatagtttttttatcaatgatatcaaggaaacgcttaattacttagtgtaatttcctgagaccacgtaacaaaccgcatttttagattccatataataaagttcccccaatcttcgtgttattagataaccccagttaaggtaccatccccatcactgctttttactcgctgccttttccaaaatccgcaaacgttgcatcacgttcttatactttaccagattggtgctcccactctttagcagttcatcacggtgcactcccaaccgccaacggtaagccttcaattcttccgttatatccatccccagcaaagccatcattgtaacccgctgttcaattgcttctagtgggtagacgttggcttgactcgtttcccgggtcacactattggtccgctttcggtgcatgtttaggggcttattcataaaggccagccggtccgccaataaataaacttgccaggtggtcaaatcatcttccacggcccggtcggtcgggtaggcgatctggtcaaacaattcccgcttgtaaagcttacctcacggcaccgtaaaacactagctcaggttaaaatgcatattatactcttcggcaaaccactccgccggggtatagaccttttcatagtgatcttcctcgcgcacccgaaaatagaatgtttgcttgtcttcaacaaattcataaaaattaccgattgcaacatcggcgtgatgacgttgcattaaatcaaccaattcggctaaattggtcggttccatccggtcgtcattatcaacaaaggctagtaactcgccggttgccatcgctaatcccgcgttccgactgtcgccaacgcccccgttgggcttatgtaagacccggacccgggaatcttgggcgcggagttgctcacaaagcgccgcactgcggtccgttgaaccgtcgttgaccaaaatcacttccaggttttggtaagtctgatttaagaccgagttcacgcaatccactaaatatttttcgtcattgtagaccgggataatcaccgaaaccatttgcgctatttttccatctccacttttattaattacaatgttaacaaaaattccttattttataccattagctgtaatccatatcaaaaccatttaagttatcacctaattccagcaaaagttgtcgtgaaaaaaggtttccccctaatcgacgaaaagaatcgtaatagcggataaacaacataaaatttaagggcatcaatatcccagcaatttttggagaaggataaataaatttgccgtccttaagagctacaaaatttgtaaacaaaacatcattatttcctttttgacgagtattcattaacttagtaaccgtatccggcgcagctaaaaagtcctctgcctcaataaaaaggatatagtcgccgatagcttgcgcaagcccaacagtttttaaattctcccactttttactactattttgcaatcggtcattggtaacttcgtagcaatttctggatcgttagaagctacaatcacttctaaatctgggtaatcttgttctaaacaggtttcagcacatcttttcagtccgttctccgtcccgttagttaaaattattaatgatactcgcaccacgttagtcctccctcgtaatatttacccgctgcttaccctcctacatttcttttatcagcttccgcacataacctgctaaatcctctggggtaggaaaaaacatggcttgattattttgataatcctctcgttgtaacgccaaaatcggtttaccagtcgcaaaaaaacgttcttgcacactttcatcacgttggatcagtgttaaatccaacattgctacactggtatcaattaattgcgttaatgctgctggcaagatcgtctgatgcaaattaacattcggataagctactaaacgctttaactcaaaactcataaaaacaggagaagcaatctcaaaatcaacctccggcaaaagcctaatcagctcctccaattgatttaattccgcccaagctgtatacaacaatagtttgggtcttactgatttgcttattacgcttaagtgattaccaatcatttgccattctaggttgtgatactcccaccattgcatacgtccgcgcacagttgacaaaaaattccacggtttgtcactacctgtatagtgatcaattaccgcatcattcactactaactgatcgtacgggggccaaccaaactgttcgccaacccgttccaggccaagctgattgttgaaacgagccggtaattcagtaatcgcaccttcacaaacgcgattaagaactgtttgatcaccattatcaatctcattttcatggctagagaaaaaatcgatgcaacgacgagttaaatctgctgtctgccatcgttcataatcaatagcactcctgtgttatacggtgcacaattgatttcatgagccatacccaccggttgcccttgtaaatcgaattttaataatggccacagactatgccgaacaatcacatcactatcgagatagagaattctctttgcttcaatcaattgcggcaggtagattcggacgtaactgtatccattaatgtgttgccacgaaactttgccaatcgccatttggttaagatcaatttttaagtcatggagctggctccctactggcgacaacttttgattaatattccgaaaccattctggtggaatatccatatttgctaagtaaacatggacattaggagtatgataaaaaattgattttaacgtcgtttccaaggccgttacatagccatagtccgcagccaaagctactacataatcgtgcattctttccctccaaattcacttactacttaactaataatttttctaccacttccaccaacatccgcttaaacatatagccattgcgcaacaaatagccatagtccttagcattttgggccatgcgctgatagtcttcggccgtgcaattttggaccagctggtcagcttccgctaaactttcggctaacaaccccaaatggcggtccttaatcaattcggccgcggcaatgtcagcattggccactacgggtagccccgctgccaagtaggtactgagcttataggacgcattgaggtgggaatattgccgttctggctgttccggggtatcgatgctccagcacaggccaaagccgccgtccaacattggtaacagggcgctttcgggatggaacccgacgtagtcaatgttttggtcgggatcggcctgggcatcagccgcaaataaccgcaagcgggtctgataagaccattcccgggtaaagggaaagcggctttgactgcctaaaaaggtcagttcccgccgaaacgccgccatttccggttggtaagtggtggggtgatcccacaggtgttggtaaacgatattatcaaccgtgagtccctcggcccttaagcgcgcagccatattttcacttggcaaaatcaacaggtcggcttcattgaaaaattccacgtacggccgcatccagtcagcataattttggctaaacatcagcggcgggacgtcttgaatgaagaaaacaatccgcgtttggtaaaggcgcagctggttgaggtactgccgctcgaattccagcccgttccacgtcgggagctgaaagatcacaatatcacccatctgcaaagaggcattgatgccgtcgatgcgcacccggagttgttctggcgaatcactggcgacattatagcgatagatggctaattcattagccccctgatccttggccagctgagccgttacattttgtgccgcttgggcggtactggtattcgccatgccgtagaggttggtaatattaatcttcatttggttccattccttcctgactaagatcggcgacaatctgggcggcatatgctggcgccgcgggcaaagtaatgtcttcagcaaagttatgttccatcgtgtgcttatggctgagctttaccttgctggtcgcccccatctgaaaccactcgtattcggaatcaatgtagccaatatccactaattgcatccccgttaccgccaattcgccaaccaaggctttagcagttgggccaagcatcaataagaccagcttgccgggcccatatttttttaatcgcggccttgagcacattgtactgagcaaaggcattatgcgcggggccaagaatccgctgcaccgacttggcattggcaaataaatcattcctcacccccgaccgggacagctgcccttcgacaatcaagatgtcgcggtcgtcccatagttgccgcagcttcgcaaaatagccctgggccaagcgcttgtcttgccaattcatgtagggacgggaaataaaggtgttgccgtaccagtcgacattggctcccatcaactgataaattgcggcgttggccggccgattctgagcccaaaaggcctgcgctgccggggtgtagcgttctaagtggctaaagacgtccgacatgcacaccaccagctccgggtggctcggcgtatacaacagccgtttcaaacgttctactagcgctgggtcgtaaacctggtaaggaatatcgcgtcccgcaatcaggtcaatctcgccatcaccaaagcgagcgactgatgaatgatgcgccaaaatataatctaaggtttgatcaatatccttgaccgtgaccccgtaaagcggctctgttgccatcactatcctccgatcgattaattgattagttactatgataagtagtcgatcagcgaaagtcaatcggctttcgccaaccaatgacaattcctctaaattgtctcacaatttagctaacgctttcattcaaattttacacccttttttccgttgttacagcaaatccccccatcgcgcttatcccaaagaaaaagcctgaaccctaaatggattcaggctttttgactggcaaacacgcttatttatcgttatgatcccggcgtttcttgcggccgagcaagccggctagcaagatgcccaggccacccagcaggccagtagccggggcagattcattcccggtttgcggcagcttttcaacggccttgccggtcttcgttgcgctcgggtcaactggacgtgctaagttgacgtagttatccgtgttcgtcgtcacatgcgatcccagttggctgattgattcagaatcgtacttcgccaaaccgtcatcagaaagactggtcgtctgtgaagttgatactgattgggagtcaaccttgtgactgtctgacccactgtgacttacagactcacttgcgcttgttgatgcggattcgctggcactagtagaagcggattcacttgcacttgtagatgcggattcacttgcgctcgttgatgccgattcgctagcactagtagaagcagattcacttgcgcttgttgatgctgattcacttgcgcttgttgatgcactttcactcgcactcgttgaggctgattcactcgcgcttgttgatgcggactcgctggcactcattgatgcactttcacttgcacttgtggatgcggattcgctggcactcgttgatgcactttcacttgcgctcgttgatgccgattcactggcactcgttgatgcactttcgctagcactagtagaagctgactcacttgcacttgtcgatgccgattcgcttgcacttgtcgatgctgattcgcttgcgctcgttgaggctgattcgctagcactagtagaagctgattcactggcactcgttgaggcactttcacttgcgcttgttgaagccgactcacttgcgctcgttgatgcactttcgctggcacttgtcgatgccgattcacttacgctcgttgaggccgattcgctgacactcgttgatgcactttcacttacgctcgttgaggccgattcgctgacactcgttgatgcactttcacttacgctcgttgaggccgattcgctgacactcgttgatgcactttcgctggcacttgtcgaggcactttcacttacgctcgttgaggccgattcacttacgctcgttgaggccgattcacttgcgcttgtggatgcggactcacttgcactcgttgaggcactttcacttgcacttgtcgatgcagattcgctggcactcgttgatgcactttcacttgcactcgttgatgcactttcacttgcacttgtcgatgcggattcacttgcacttgttgaagcggattcgctagcacttgtcgatgcggattcacttgcgcttgttgaagcggattcgctggcgcttgttgaagccgactcacttgcactcgttgaggctgattcacttgcactcgttgaggcactttcgctggcgctcgttgatgcagattcgctggcactcgttgaggccgattcgctggcgcttgttgaggccgattcgcttgcacttgtcgatgctgattcacttgcactggttgaagcagattcgctggcactcgttgaggcactttcgctggcactcgttgaggccgattcacttgcgcttgttgaagctgattcacttgcacttgtcgatgctgattcacttgcgctagtagatgccgattcgctggcactcgttgaagcagattcacttgcgcttgttgaagccgattcacttgcgcttgttgaagccgactcacttgcactcgttgaggcactttcgctggcgctcgttgaagcagattcgctggcactcgttgaagcagattcgctggcgcttgttgaggccgattcgcttgcacttgtcgatgctgattcacttgcactggttgaagcagattcgctggcactcgttgaggcactttcgctggcactcgttgaggccgattcacttgcgcttgttgaagctgattcacttgcacttgtcgatgctgattcacttgcgctagtagatgccgattcgctggcactagtagaagcagattcacttgcgcttgttgaagccgattcacttgcgcttgttgaagccgactcacttgcactcgttgatgccgattcacttgcacttgtggatgcggactcacttgcactcgttgatgcactttcacttgcacttgtggatgcggattcgctggcactcgttgatgcactttcacttgcgctcgttgatgccgattcactggcactcgttgatgcactttcgctagcactagtagaagctgactcacttgcacttgtcgatgccgattcgcttgcacttgtcgatgctgattcgcttgcgctcgttgaggctgattcgctagcactagtagaagctgattcactggcactcgttgaggcactttcacttgcgcttgttgaagccgactcacttgcgctcgttgatgccgattcactggcactcgttgaggcactttcacttgcgcttgttgaagccgactcacttgcgctcgttgatgcactttcgctggcacttgtcgatgccgattcacttgcgcttgtggatgcggactcacttgcactcgttgaagccgattggcttgcactagtagaagctgattcactggcgctcgttgaggctgattcgctggcgctcgttgaggctgattcactggcactcgttgaggccgattcgctggcgctcgttgatgcagattcgctggcactagtagaagctgattcactggcgctcgttgatgccgattcacttgcacttgtcgatgcggactcacttgcactcgttgatgcactttcgcttgcacttgtggatgcggattcgctggcactcgttgatgcactttcgctagcacttgtcgatgccgattcacttgcactcgttgatgcactttcgctagcactcgttgatgcactttcacttgcacttgtggatgcggattcgctggcacttgttgatgcggactcacttgcacttgttgaagccgattcactggcgctcgttgatgccgattcacttgcacttgtcgatgccgattcactggcgcttgttgatgcggactcacttgcactcgttgatgcactttcacttgcacttgtggatgcggattcgctggcactagtagaagctgactcacttgcacttgtcgatgccgattcactggcactcgttgaagcactttcacttgcgcttgttgatgcggactcacttgcactcgttgaagccgattcgctagcacttgtcgaagctgattcactggcgctcgttgatgctgattcactggcgcttgttgaagccgactcacttgcgctcgttgatgcactttcacttgcgctcgttgatgccgattcactagcactagtagaagctgattcactggcgcttgttgatgcagattcgctggcacttgtcgatgccgattcgctagcactagtagaagctgattcactggcgcttgttgatgcagattcgctggcacttgtcgatgccgattcgctagcactagtagaagctgattcacttgcacttgtcgatgccgattcactggcgctcgttgatgccgattcgctggcactagtagaagctgactcacttgcacttgtcgatgccgattcactggcactcgttgatgcactttcgctagcactcgttgatgcactttcgctagcactcgttgatgcactttcacttgcgctcgttgatgcagattcgctagcactagtagaagctgactcacttgcacttgtcgatgccgattcactggcactcgttgatgcactttcgctagcactcgttgatgcactttcacttgcgcttgttgaagccgactcacttgcgctcgttgatgcagattcgctagcactagtagaagcagattcacttgcgctcgttgatgccgattcacttgcgcttgtggatgcggactcacttgcactcgttgatgcactttcacttgcacttgtggatgcggattcgctggcactagtagaagctgactcacttgcactcgttgaagcactttcacttgcgcttgtggatgcggactcacttgcacttgtcgatgctgattcgctagcactagtagaagctgattcacttgcactcgttgatgcactttcacttgcgcttgttgaagccgactcacttgcgctcgttgatgccgattcacttgcactcgttgaggcactttcacttgcgcttgttgaagccgactcacttgcgctcgttgatgcactttcgctggcacttgtcgatgccgattcgctggcactagtagatgcggactcacttgcgctcgttgaagccgattggcttgcactagtagaagctgattcactggcgctcgttgaggctgattcactggtactcgttgatgcactttcgctagcactcgttgaagcactttcacttgcgcttgtggatgcggactcacttgcactagtagaagcagattcacttgcgctcgttgatgccgattcacttgcacttgtcgatgccgattcacttgcgcttgtggatgcggactcacttgcactcgttgatgcactttcgcttgcacttgtggatgcggattcgctggcactagtagaagcagattcacttgcgctcgttgatgccgattcacttgcacttgtcgatgccgattcacttgcacttgttgaagcagattcacttgcgctcgttgatgccgattcgctggcactcgttgatgccgattcgctagcactagtagaagctgattcacttgcgctcgttgatgccgattcacttgcacttgtcgatgccgattcactggcgcttgtggatgcggactcacttgcactcgttgatgcactttcacttgcacttgtggatgcggattcgctggcacttgtcgatgccgattcactggcgcttgttgatgcggactcacttgcactcgttgatgcactttcacttgcacttgtggatgcggattcgctggcactagtagaagctgactcacttgcacttgttgaagccgattcactggcgctcgttgatgcactttcacttgtgcttgttgaagccgactcacttgcgctcgttgatgcactttcacttgcgctcgttgatgccgattcactagcactagtagaagctgattcactggcgcttgttgatgcagattcgctggcacttgtcgatgccgattcgctagcactagtagaagctgattcacttgcgctcgttgatgccgattcgctagcacttgtcgaagctgattcactggcactcgttgatgcactttcacttgcactcgttgatgccgattcgctagcacttgtcgaagctgattcacttgcgctcgttgatgctgattcactggcgcttgttgaagccgactcacttgcgctcgttgatgcactttcacttgcgctcgttgatgccgattcactagcactagtagaagctgattcactggcgcttgtcgatgccgattcgctagcacttgtcgaagctgattcacttgcactcgttgatgctgattcacttgcacttgtcgatgctgattcacttgcgctcgttgatgctgattcgctggcacttgtcgatgccgattcacttgcgcttgttgaagctgattcacttgcgcttgttgatgcggattcgcttgcactcgttgatgcactttcacttgcgctcgttgatgccgattcgctggcgctcgttgatgcactttcacttacgctcgttgatgcactttcacttacgctcgttgatgcactttcacttacgctcgttgatgcactttcacttacgctcgttgatgcactttcacttacgctttttgatgccgattcgctggcactcctcgttgaagcggattcgctggcactcctcgttgaagcggattcacttacgctcgttgatgcgctagtcgaagtactcgtcgaggtggattcctgttcactcttactcgtcaattgacttggaatcgtcgaatcaactgaatgagtatcctgatcgtagttgtagacttcttgaccaaccaattgaccttgcaagtttttccaagtatcttgccaagagttaataattgcataaccaccagaaaatgccccattataatttcctgctgcaagattagcttggtcagcattactatgttgagtcgtaaaggtaactgtaaaagaagcattcatggtgttgttattatctccccaagattggaaatacatagccgtcccaattgtgtccttattgaaaccagtggtaaatggtgctgtgtttaccacaatatctttggtattttgtttgtctcgtactgttgcttcatcaaattcattattataagcaaaagaataaccaattttatcatctttatagcttcccttgcccgaaaagaccgagttatcaaagtcgctatttgacatatgccaaatatctgcataccgaccatattgatagaaatcattcttgacgtcactaattactccatttgtcttattaacgttctctggcttaaatgtgatatcattttctggattgacatcccctgaattgagatcacttggcgattttcgtaccttcagaccacttgttagtccattattacccaaatggctgtaagtcgttcctggttgtaagctaatatggacattcacatcgctaatgattttgtaatccttagttaggtaaaaacccatttggccatttctcaaaccataattaagaggattgtaaccttcataccatatcccttttttaggatagaaggtaactgtccactcggtttttccattacctaggtcttttgtctgtatattaacgttgttcttagcataatcagtagtttgaccagtatcccgagtagtataagcattgatatcccaccataatcggttgtttttatctccggcaatccacttgtatttatcgttgccattacttccccaataagcaggcgtatcccccggtttcgtattggtatcgggcgtccccaaccccgagctggctgggatatttgccaacaccattgtgcccaattggttgggctcgaacaccgtcatcaacgattgcaattcactcaaaccatggctggcatcactttcactgacttggttcttggccaagacgtcttggtagtgcgcaatggccgcttggtaggcttgctgatagtcgctggccgcatttttgtaactgtccgtggccataaaggtattcgcctgagctaccagttgctttaatcggtcaacattcgacgtggtcggcgctgtcgtatccaccaggctgttcgcattaatcgtttgactggttgcactcgtggccgtccccgacatcgtttggctggtggtactcgtcgtgctggccgattccttgaccgaagtcgaattgctggttaaggacgtactggtactcgtggcggacgtcgacgtgctggtttcactagtggatagtgagcccgaagtactggtcacttggctcgtagtgccttgattgttggaggaagtcaaactaacttgatcggtatttgccaaggcactgttcgcggcattattcgtggccgtcgtttggacccccgtggtcgtggccgccaacgctccggttgaagcaaccgtgccgcccccaatcattgccccggcggctaagacccctttcagcaaggtcgccgactttgaatccaagttcgcttctgattcatccaattgcaccttgtgtggtgccgaatgcgttgcgatctttagtaaacccacccgggttaacaaacattgcacccattgcttccctgacttgtacaattttacccgagtagtccgggagctttcggtgatcgtttccttttttgtccgtttcaagatcccacgtcctttcatttctttatgtacgcttctagtcagttgccttgcgctcaatatttatcaattgattaacccgtcctgcgacgctcgtcccaatttcaaacatttccgctaatcaggttaatcgcgagataaccatttctattatcactataagcactttattcattcgctttcatcagcttttcattgatcatatttaaaatgcttaataggtgttaaatagatagtaatcttttttcaacatatttatcaacgggatattaaaaaaacttacaatttatttaaatattaatacctactgagtgatcaatatttataacttgaatcataattttgagtgctttttctcccgccacagccccgagtcttagggggccattgcgtcaatttatcaatggtctaggtggtgttttcaccactcattagcttcatcatcttgttatgtaggaatggtctattttagcttatgataatttataatttttcgccgggggccggccgaccattaattttgcccttggtaccaacaaccgaatgtattgatcgggttacattttgctcccctggttccgactaaagataattaacccatccccggagtcaaacttgctttggcgcgggtcaaccatcccgtcgacatattttctcatcgaattctcatttaagtcttttcaatcccagcgaaacctgctatgctaaccccactagctgcaaagcatgctcaaacaactggattggaggagatcatatgcgcaaaattactgtgaattcggactttaccttgccagtccgcagtgaaaaacaaatcgccagcaacgttttgaaaggctcgctggggaacctgatcgaatggttcgattggtacgtctacgcttcctttgctatctacttttcgggcgcattctttcccgctcacaaccccacggcccaactcctagctgccgcgggggtctttgcgatcggctttttcatgcggccgcttggttcgttaataatggggcgcctggctgatcgccatggccgccgtacggccctaactatttcagttgtaatcatggcaacgggctccttgatcattgcgttcgtcccgacctatgctaccattggcatctggtcgcccctgattttgattgccacccgcttattgcagggcctgtcgctcgggggcgaatacggaacctcagcgacctacctgtcggaaatggccagtccgcaccaccgcggcttttacgcttcctttcaatatgtcaccctgattgcagggcaactgttcgccttgctggtgcaaattgtcctgcaaagtttctacaccaatgcccaactgaccgcctttggcattagggccatcggggccttggtcattgtgtcggggtacacctcagcttttaagagtttcgttttccttttttagctctttaagcttagactgatttgcttgataatttgcttctaatttttcaatttcatcattcaacttagcaagagtattaggagtaagtaccattcctgcaagcatcttaccttgctgaagagtaattgtttttttggctttgtcgttcacagataataaatattcataattatctaaaaattgacttaatgaaaccatataggtttcatgtaaatgttttcttagcatttaacttgccttcgctttctaaaaatttgttaaggctatttgccttaacaaacttattctaattggcagattgcaagaaataacttgaacgaatttagtgacgtaggttaagcaagaagatctcgattggtgtgcgccagttaagacatttaagtggccaggaattcagataccaactgatttgaaccagctggcgatcgctcagctcttcaatagcttgtcccttgggaataaatcgtcgcaaaattcggttacggttctcattactaccgcgttcgtgcggtgaataggcatgggcaaagtaaacctgagtacccgttagctgttcaattgcctgataattagcgaactctttaccatgatctacggtcagcgtcttgagcttgtcttgaagttgactagctagttcaagtacggcttgagtcatgaactgactgtcgcggccatggagccgtttaacaattgtcaggcgactcttacgctccacaaaagtagccacagcttgacctttacgtttgccagaaagtacggtatcagcttcaaagtggccgaactcctggcgagtttcgactttatgaggacgctcctcaatggagcggccgtgactgaacgtaccccgcttttctttagcacgatgacgacgaattccatgatcaggcaaatcgggtagctgtacatcaagccagccttgatcaatccagttatagaccgtcttgtaggcaatccccaccacatgggtaacttgttcaggggaccacttctggacttgaatcttttcctcaatcaagtgcttaaggcttttagtgagcgaagacttccacccccgttgactaaccttgcgttcaaagtcagtttgcgctagctcagcccggtactcactatttagccggtgaagttcgttaaagatggtggtcttactaaagcctaagtagttagcgatgtatcgcaaggaacgtccttcactaagcgtttcaatgacaacacggttctggaatgataaaatagcggtgctcatcaaggtccttctttctaatggattgtgtggtaacaccattaaagaccttgatggttttttctgtccacttaaatgttcaacttaaattttacaatctgccataaagaaaaatcctcctgtactgaatggtatattttcagtataggaggattggtcgaccgcgcctagacgtgtcgttattgactgcttaccgtttgttggctactaaaaagggcccgaccctaaccgtaattggttagggccgggccctttcttatgcgttgcgcggtggtaaattaattaccttagtcttcgcgcttcttcttcagaccgagcaagccgaggaaggctacgcccagcccactcaacattgcccacgtagctggttggtccccagtctgtggcaagtgttgttgtgcttgttgcttagttgcggtttggttcgttgacgttgcgcccttcgtttggccaccattggtcccaacacctggctttatcgccgagccagtagtcgcttcagtcacgtgcttgtgcaggtttgcctgcagcgtggtcgtgctaccgtccgcaaaggtaacttgtacgttcccggcggtatcaaccgtgatcgtcgcaattggggccgttgggttggtcgtctgaattgcttccttgacttggtcttgttcggcttgcgtcaagtggttcggatcaaccacgttgaccgcttgcccagggttcagtgggtatttatccgcatccgtcttgcccgttaccaagtcgtgacctgaaatcgtattcgtggagccatccgggtacgtgatggtcgtcgtcccatcgtcaccgaccgtgaccttcgtcccatccggcaggttcgagttcgcttcgtcaaccttgtccttaacggcgttcttttcattatccgttaacttggttgggtcatcaaccttcaccttgtcaccgcctggtacgtttggcgtgttcttatcagcgtcactcttgccttcaatgacctggtcacctgggatcgtgtccttcgagccatctgggtaggtgatcgttacgtcaccgttgtcactgaccgtgaccttgctaccttctggcagcgtcgacttgccattctcatccttgttggcgtctttaatggcttgttcaacatcggacttttcatcttccattaacttgttcgggtcatcgaccttcaccttgtcgcccggtaccttcggttcgttcttgtcggcatcagtttggccttccgtacccttaccttcaacgaccttgtcccctgggatcgtgtccttggagccatctgggtaggtaactgttacgtcgtcgttgtcgccgaccgtaaccttgctaccttctggcagcgtcgacttgccattctcatccttgttggcgtctttaatggcttgttcaacatcggacttttcatcttccgttaacttggttgggtcatcgaccttcaccttgtcgcccggtaccttcggttcgttcttgtcggcatcagtttggccttccgtacccctaccttcaacgaccttgtcccctgggatcgtgtccttggagccatctgggtaggtaactgttacgtcgccgttgtcgccgaccgtaaccttgctgccttctggcaacgttgacttgccattctcatccttgttggcgtcttcgacggctttaactacttccgacttttcgtcttccgttaacttgttcgggtcatcgaccttcaccttgtcgcccggtaccttcggttcgttcttgtcggcatcagtttggccttccgtacccttaccttcaacgaccttgtcccctgggatcgtgtccttggagccatctgggtaggtaactgttacgtcgccgttgtcgccgaccgtaaccttgctgccttctggcaacgttgacttgccattctcatccttgttggcgtcttcgacggctttaactacttccgacttttcgtcttccgttaacttgttcgggtcatcgaccttcaccttgtcgcccggtaccttcggttcgttcttgtcggcatcagtttggccttccgtacccttaccttcaacgaccttgtcccctgggatcgtgtccttggagccatctgggtaggtaactgttacgtcgccgttgtcgccgaccgtaaccttgctgccttctggcaacgttgacttgccattctcatccttgttggcgtcttcgacggctttaactacttccgacttttcgtcttccgttaacttgttcgggtcatcgaccttcaccttgtcgcccggcacctttggttcattcttggcggcatcgctcttgccttccaccactttgtcccctgggatcgtgtcgactgaattgtctgggtaggtaatagtggtatctccattgtcacccacagcaatcttggttccttctggtaagccggtgttgtgatcacgaatgttgtcttcgacttctttcttttcgtcattagtcagcttcgttggatcatcaaccttggtcttggctggaaccgttggatccagcttttcagcactagtcttttcttcaaccagctgattaccttcgatagtgtcgactgacttgtctgggtaggtaatagtggtatctccattgtcacccacagcaatcttggttccttctggtaagccagtgttgtgatcacgaatgttgtcttcgacttctttcttttcgtcattagtcagcttcgttggatcatcaaccttggtcttggctggaaccgttggatccagcttttcagcactagtcttttcttcaaccagctgattaccttcgatagtgtcgactgacttgtctgggtaggtaattgtagcttttccatcattagctacggtgacacccgttccttctgggaacttatccttattagcttcaacaatcttatcttcgatcgtcttcttttcatcagccgttaagctggttggattatcaaccttggtcttggctggaaccgttggatccagcttttcagcactagtcttttcttcaaccagctgattaccttcgatagtgtcgactgacttgtctgggtaggtaattgtagcttttccatcattagctacggtgacacccgttccttctgggaacttatccttattagcttcaacaatcttatcttcgatcgtcttcttttcatcagccgttaagctggttggattatcaaccttggtcttggctggaaccgttggatccagcttttcagcactagtcttttcttcaaccagctgattaccttcgatagtgtcgactgacttgtctgggtaggtaattgtagcttttccatcattagctacggtgacacccgttccttctgggaacttatccttattagcttcaacaatcttatcttcgatcgtcttcttttcatcagccgttaagctggttggattatcaaccttggtcttggctggaaccgttggatccagcttttcagcactagtcttttcttcaaccagctgattaccttcgatagtgtcaactgacttgtctgggtaggtaattgtagcttttccatcattagctacggtgacacccgttccttctgggaacttatccttattagcttcaacaatcttatcttcgatcgtcttcttttcatcagccgttaagctggttggattatcaaccttggtcttggctggaaccgttggatccagcttttcagcactagtcttttcttcaaccagctgattaccttcgatagtgtcgactgacttgtctgggtaggtaattgtagcttttccatcattagctacggtgacacccgttccttctgggaacttatccttattagcttcaacaatcttatcttcgatcgtcttcttttcatcagccgttaagctggttggattatcaaccttggtcttggctggaaccgttggatccagcttttcagcactagtcttttcttcaaccagctgattaccttcgatagtgtcaactgacttgtctgggtaggtaattgtagcttttccatcattagctacggtgacacccgttccttctgggaacttatccttattagcttcaacaatcttatcttcgatcgtcttcttttcatcagccgttaagctggttggattatcaaccttggtcttggctggaaccgttggatccagcttttcagcactagtcttttcttcaaccagctgattaccttcgatagtgtcgactgacttgtctgggtaggtaattgtagcttttccatcattagctacggtgacacccgttccttctgggaacttatccttattagcttcaacaatcttatcttcgatcgtcttcttttcatcagccgttaagctggttggattatcaaccttggtcttggctggaaccgttggatccagcttttcagcactagtcttttcttcaaccagctgattaccttcgatagtgtcgactgacttgtctgggtaggtaattgtagcttttccatcattagctacggtgacacccgttccttctgggaacttatccttattagcttcaacaatcttatcttcgatcgtcttcttttcatcagccgttaagctggttggattatcaaccttggtcttggctggaaccgttggatccagcttttcagcactagtcttttcttcaaccagctgattaccttcgatagtgtcgactgacttgtctgggtaggtaattgtagcttttccatcattagctacggtgacacccgttccttctgggaacttatccttattagcttcaacaatcttatcttcgatcgtcttcttttcatcagccgttaagctggttggattatcaaccttggtcttggctggaaccgttggatccagcttttcagcactagtcttttcttcaaccagctgattaccttcgatagtgtcgactgacttgtctgggtaggtaattgtagcttttccatcattagctacggtgacacccgttccttctgggaacttatccttattagcttcaacaatcttatcttcgatcgtcttcttttcatcagccgttaagctggttggattatcaaccttggtcttggctggaaccgttggatccagcttttcagcactagtcttttcttcaaccagctgattaccttcgatagtgtcgactgacttgtctgggtaggtaattgtagcttttccatcattagctacggtgacacccgttccttctgggaacttatccttattagcttcaacaatcttatcttcgatcgtcttcttttcatcagccgttaagctggttggattatcaaccttggtcttggctggaaccgttggatccagcttttcagcactagtcttttcttcaaccagctgattaccttcgatagtgtcaactgacttgtctgggtaggtaattgtagcttttccatcattagctacggtgacacccgttccttctgggaacttatccttattagcttcaacaatcttatcttcgatcgtcttcttttcatcagccgttaagctggttggattatcaaccttggtcttggctggaaccgttggatccagcttttcagcactagtcttttcttcaaccagctgattaccttcgatagtgtcgactgacttgtctgggtaggtaattgtagcttttccatcattagctacggtgacacccgttccttctgggaacttatccttattagcttcaacaatcttatcttcgatcgtcttcttttcatcagccgttaagctggttggattatcaaccttggtcttggctggaaccgttggatccagcttttcagcactagtcttttcttcaaccagctgattaccttcgatagtgtcaactgacttgtctgggtaggtaattgtagcttttccatcattagctacggtgacacccgttccttctgggaacttatccttattagcttcaacaatcttatcttcgatcgtcttcttttcatcagccgttaagctggttggattatcaaccttggtcttggctggaaccgttggatccagcttttcagcactagtcttttcttcaaccagctgattaccttcgatagtgtcgactgacttgtctgggtaggtaattgtagcttttccatcattagctacggtgacacccgttccttctgggaacttatccttattagcttcaacaatcttatcttcgatcgtcttcttttcatcagccgttaagctggttggattatcaaccttggtcttggctggaaccgttggatccagcttttcagcactagtcttttcttcaaccagctgattaccttcgatagtgtcgactgacttgtctgggtaggtaattgtagcttttccatcattagctacggtgacacccgttccttctgggaacttatccttattagcttcaacaatcttatcttcgatcgtcttcttttcatcagccgttaagctggttggattatcaaccttggtcttggctggaaccgttggatccagcttttcagcactagtcttttcttcaaccagctgattaccttcgatagtgtcaactgacttgtctgggtaggtaattgtagcttttccatcattagctacggtgacacccgttccttctgggaacttatccttattagcttcaacaatcttatcttcgatcgtcttcttttcatcagccgttaagctggttggattatcaaccttggtcttggctggaaccgttggatccagcttttcagcactagtcttttcttcaaccagctgattaccttcgatagtgtcgactgacttgtctgggtaggtaattgtagcttttccatcattagctacggtgacacccgttccttctgggaacttatccttattagcttcaacaatcttatcttcgatcgtcttcttttcatcagccgttaagctggttggattatcaaccttggtcttggctggaaccgttggatccagcttttcagcactagtcttttcttcaaccagctgattaccttcgatagtgtcgactgacttgtctgggtaggtaattgtagcttttccatcattagctacggtgacacccgttccttctgggaacttatccttattagcttcaacaatcttatcttcgatcgtcttcttttcatcagccgttaagctggttggattatcaaccttggtcttggctggaaccgttggatccagcttttcagcactagtcttttcttcaaccagctgattaccttcgatagtgtcgactgacttgtctgggtaggtaattgtagcttttccatcattagctacggtgacacccgttccttctgggaacttatccttattagcttcaacaatcttatcttcgatcgtcttcttttcatcagccgttaagctggttggattatcaaccttggtcttggctggaaccgttggatccagcttttcagcactagtcttttcttcaaccagctgattaccttcgatagtgtcgactgacttgtctgggtaggtaattgtagcttttccatcattagctacggtgacacccgttccttctgggaacttatccttattagcttcaacaatcttatcttcgatcgtcttcttttcatcagccgttaagctggttggattatcaaccttggtcttggctggaaccgttggatccagctctgctgaagtctttttgactacatacacatattcatcgtgatgatcaatagtatatgttccatttacagtatttgcttgattggtcgccaaattatagtccgttggtaaattgacatcataattataattttctcccaatttaccactaatcttatctgttgctacttcttccccatctcccggcacaaaaatagaatttttactcccagttacatcgatataatgaactctaacttcagacttatcttcactaccatcctttgcataatagtaaacaataccatcattagttgatgtaatctgatttatatatgtgtaccattttccatgcgaaataaacgacatgcgatcgttaacatttaacttgttccccaagtaacgtgtcgtattattaagcacttcaccatcataatacgcagtaactcgaaccaacccttgagcgtcaattactgtttgctttataactacatgtttatcaagtctaaaatcatacgattcacccactttatatggggagatatatcctgtggtctctggcgattttttcaatgtatatccatcaatagttggtgcctctccggtaattgtgtatttctgataagcaacaccttcaaaagattttggcactgcaatttcgtctcccgttgcttgatcaatataatgaatcgtagttgtcattttcgttggtattggagtcatcacaaagccatttcccattgaagctgggtctcccttaattccggtattgtgaccatatgcaaaaccaaccaccatgccatatatattatcgcctttttcgatcccatcaagatcaattgaagcactagtcccatcataattagtaaaaattggagtatgagtagttccactatactcaaccttctttgattcaccaggtgctaccactgcttcttgtatatttttacccaatccagtatgcaaaattgttacatataaactattatcattcaaattatttgagcgggccaacaaatagatagcatggtaatgttcattatagttagcaacaccggcaaagtagtatctcccgctctcatcgttggcagtgtggttttgtaagatttcctttattttttctgttgaagtgtcctgataccacttcaggttattgtatacccagttatccgtgggcttattaattatctccgttaacatgggctgggaatccagcttaatgtcttggtttgaaatcggtaagctagcagtacctgccaccttcattactggtcgtgcagccagtactttaaacttggcggctgtaaacttggcggttgtaaacttggcggttgtaaacttggcggttatcttttgtgtagttggtgttgttgcgtcgttagccggcgttacttcagtatcttttttgtcgacattggtagtattttgcgtagtatcttggccttgcggagtatcttggtgatttgttgcctcttcagtatcggttgtaggtacttgctgatttacattttggccatttgcttgtttatctgtactatctccactagtctgcggcgtagatgttgtaccttctgttgtaccttcagtaaccttgtccttattgcccccttgagtcgtggtacttcgtgttacatcatcactaggactagtaacagtatctgctaataccgcatggttgccatatagcataaaagttgtccccaacaatactgatgctactcctacagataacttccgtattccccaacgttgcttcctttcggcatgcttttgttggtagaattgatgattgtttttcgaaaccatatccgttcctcctaagctcataaaatatatatacttatcacactcttagtgtatcatatacttcgtataaatctatcaaaaaaacgattcctaaatttcaagaataagttagccactggactcaaataaataatactgatcaattgattattggtcgatggagctgtgatatctcttggtagaaggccttacgatagatatccattgacgaatgtccattaaacatagctcgtggatagtgattcatccaatcattagtcgctatgatctgagcactactatagttatttataacttcacctttggtaatctccttgcggagaaaccggttattgatctcattggatccgcgttcccaaggagaatatgggtcagtgtaaaaaacatggtcatgaactcgcgttaactcactaaattcagaaccattatcagaagtaattgttttaaaaatgcgatagtaagcattcttgccaagcttctgacgcaactcaacaaaaaaatgattcactgcatatgcagttttactggtaatttttctcgtaatattaacccgtgaaaaacgatcagtcattactagaacaacgctatccttgccatctttatgaccttgaatagtgtctagttcccaatgaccaatttcggaccgttggtccgcaacctgtggacgttgagcaatgttaggtcctaagcactttttggcttgtgaatgagattgatggtgtttacgtttagttttctcaaaaaggtccaagttagacgtacggaatacaccatcattaatccactgatacaaagtcacaacagacttagggatcagtgaatcatcactcatcaaatcacgtgccttataaatagccgcttgaggagagtaacgatgctcatcaaattcaccaagcattaattggtcggccaattgtaaaaaacgctttgagcggtaatataaacgaggacgaccggaccgttggtggcatttaagataaatattctgaccagcttcataactgtagatgtgataagggtaatcgtaagtcttaccattgaatttttgacgacgaatttggcgaactgtaccacgtttaagctcattattaatggtttggtggttcactcctaattgacgaccgattgcgcgattggaaagtccttgcgactttaaagtcgcaatcatcactctctcttctttagtaaggtgtgcatatttgcgataagtggccaaaaggttagtgagcatggtatcatttaagtgcgtcatttgacggacatcctttcatatagttttgattcacttaatatgatacctgatgtcacgccgaatggcgtttttgcatttaccaccaattaggtggctaacttcattctataatccaccgttttaatatctttttgaaagcgtcttccaatcgctaaccaactaatagttaattttcttaagtcagtagggaaaatgggcccaccatgcggcccgaagccacaaaaaaagccccccgccagcagcaatcaggccgcaagcggggggcttttcggtgggggccgaggcctcaaccaatcccttataagttgctaaaatcagttttatctaaatctgtatccgggttaacttttggccaactgtcaaagtgccgcaaccaccatttgtaattatcgtcggcgacttggtagaacaagcccgtggacgagatccggtacttggtaaagccgttgccgacttgatccatcgtgccaatgattggcaccccatagaagtactggtggtccatgtcaataatcgtggtaaagtgcccactcttggcctctttgtcggtaaagaagccttcaaagtacttaatcccttccatcaggactaagcgtgattccatatcggccaagtactccggcgttaaatgttgcgaaattaccggtggattcccggacggataagtgttttcgttgtaccccgccgtcatggtatgcggcgccaacaacacggcaatcgatcccaagtgggagtaaccggcaaattgcggcatcagcccagcttggtattccgctaacgcatgcacggccaacattgccttgcgcttatcattgaggggcgctaattccaaggggtgttcaccgatggcaaagcgcatcaagttgacggtctttaacatccgctgactgtaagcatccgccaaattgaggagcggctttaacgcggccacatcggcatccgttggcaccgtccgaatcgccttggtgacatccccattgatcgcatcctggccaccacggccggcttccagttccacttgcaattgtccctttaagcggtccaccgtggccaccagctgatcataagcaggggtccccacttgcaagtaatctccaaccgttcggtattgcagatattccggatccagcggggccccttcataaacgctcccttggtatggcaaggtcgcattgactaattcggcccgttccacaactttcttcagtgtggtcgtgagtttgtagtgttcgtcagcatattggacataggtactggttcccggcacctgctcggccattagttgctccaaagcttcttgccgccgcacattattgtccgcgatcaatttatccgcggccgcttgggcggcttccgcactggtcaagacctcctgtaatgtggccgcttgactttcatactgataggcctggtcgggatcggccagcatcgcttgcgcgcccttgatgaagtcattgacccggttgatttcattgtataaggtcaaccgcgtcgcaactaagttttgcaaggcgatcacggcggcttccaaatcgcgccgcccctgcatttgttgggccgaactttggatatataaatccatccatcgtttcagtgacgcctgattatcctgaatcccttgcgtggtataagtctttagatttggtaagacattgatcccgtatgcttgcaagatgccttctgcggcctggcggtattcaggactgacatactgcaaggccgtttgatagtaggcgaccgtagctttaaattcattgatcgcatccactttggcctgctcggcgggactcaaaatcgcgccgtctaatttggcctgggtggcctcaacttgcgccacggcggcatccagcatcgcctgcgtcaccgctggcgtggtcatcagtttttgtaaggccgccacggcttcgtcatacggggcttgagccgtcgtcgtggcattgtgataccgcggatcttgttcccgttggtcataccgcttcagcaaaaccgtcgccacgttaaagtccgtagcctgaccatccaacgcagcttgagccgcatcgatttgcgcgatggcggcctgcatttgctccgccgtaacttgcggatcgtattgcaactggctcgcggctgctaaagcggtccggtaagctaattgcttggcagcatccgcattgtaatacgcggccgttgtcatcacgctttgacccgttaacaaccgccgttgtaacggttggagatcaattttcggttgagggcgaggggttggtttcacctcgtcgatcgactggggttgctcgtcgctggccccagaaccagacgttgggttgtcaccactcgtggctggtgtgtctgtcccagacgttggcgttttgctggctgtgctactgtccgacgtggctggtgcttccccacctggcgttgcactggtcgttggattgtcaccgctcgtggccggcgtgtccgtcccggacgttggcgtttcacccgctgtgccactatccgacgtggctggtgtgtctgtcccagacgttggcgttttgctggctgtactactgtccgacgtggctggtgcttccccacctggcgttgcactggtcgttggattgttaccgctcgtggccggcgtgtccgtcccggacgttggcgtttcacccgctgtgccactatccgacgtggctggtgcttccccacctggcgtcgcgctggtcgttggattgtcaccgctcgtggccggcgtgtccgtcccggagcttggcgtttcgcccgctgaggcactagctgacgtggctggtgcttccccacctggcgttgcactggtcgttgggttgtcaccactcgtggccggcgtttctgtcccggacgttggtgtttcacccactgaaccactatccgacgtggctggtacttccccgcctggcgttgcactggtcattggattgtcgccgctcgtggccggtgtgtccgtcccggacgttggcgtttcgctcgctgaagtactgccggacgttgccggtgcttccccacctggcgttacactggtcgttgggttgtcgccgctcgtggccggcgtgtccgtcccagagcttggcgcttcacccgctgaaccactgtccgacgtggctggtgcttccccacctggcgttgcactggtcgttgggttatcaccactcgtggctggtgtgtctgtcccagacgttggcgttttgctggctgtgctactgtccgacgtggctggtgcttccccacctggcgttgcactggtcgttggattgtcaccgctcgtggccggcgtgtccgtcccggacgttggcgtttcacccgctgtgccactatccgacgtggctggtgcttccccacctggcgttgcactggtcgttgggttgtcaccactcgtggccggcgtttctgtcccggacgttggtgtttcacccactgaaccactatccgacgttgctggtacttccccgcctggcgttgcactggtcgttggattgtcgccgctcgtggccggtgtgtccgtcccggatgttggtgtttcacccgctgaggcactgctggacgtcgccggtgtttccccgcctggcgtcgcgctggtcgttgggtgctcgccgctcgttaccggcgtgtccgtcccggacgttggcgtttcacccgctgaaccactgtccgacgtggctggtgcttccccacctggcgttgcactggtcgttgggttatcaccactcgtggctggtgtgtctgtcccagacgttggcgttttgctggctgtgctactgtccgacgtggctggtgcttccccacctggcgttgcactggtcgttggattgtcaccgctcgtggccggcgtttctgtcccggacgttggtgtttcacccactgaaccactatccgacgttgctggtacttccccgcctggcattgcactggtcgttggattgtcgtcgctcgtggccggtgtgtccgtcccggacgttggtgtttcacccgctacgccactgtccgacgttgctggtgcttccccgcctagtgttgcactggtcgttggattgtcgccgctcgtggccggtgtgtccgtctcggatgttggcgtttcgctggctgtgctactgtccgacgttgccggtgcttccccgcctggcgttgcacttgacgttgggttgtcgccgctcgttaccggtgtgtccgtcccggatgttggcgtttcgctcgctgagccactagctgacgttgcgggtacttccccacctggcgtcacactgaccgttggcttgtcacccttcgtggttggctgactcccttgatcaagcggggtggccgccattcccaggccaccaaaagtcccgatcggctcactgctccggcctgaactgacttgcggccacaggatcgcattggtcgttccgattggggtccgccagacttgcggtggcaagtttcgatcaatcagtttccgaccatccggcgtagtcatcgtcacgtggttgccgcgaatctttacgaccgttcccaccgggatgtggtactgatctccttcgtgcaaaccattccactccatcaaagtatggtaatcaatccccaaaacttgcgccaaggcccacaaagtgtcacccgcccggaaagtataggtttgatccgttggcgcaatgcggggcgcaatctccgccggcgtcgtcgctcgccacggtaacaagctcgccgcatcaatcgtggttaggcctaagcctaaggtaaacgcggttaagtcaatcgcaatccaatggtttcctttcttaactaacttgacccggtacaaccggtcagcaatcatttgatatttatgttccatttttctcccccttattttaaggataatttaaccaatggccactctgcttcaagttaattctaacttaatttcttgcttttttcacttattacgcgaaaaaagaggctgatcagcgatcaagcccctttcctcattggctaaattattcttttcgtttccgcttgctcaggcccaacaaccctagaacgccgagcaacgtcaagcccagcacacttgtttcagacgtttggttccccgtctgtggcagttcttgccttgccgttggggttccttggcccgaaggggtcgacgttgattgactcggtgccgttggttgagcaggctgcgatggtcctaccggttggactggttgaactgacggcgtaatctcaccaccgttggtcgtcttcaagtagtagaagatgacctcggtcaagcgaccatcggcccctttgatttcccgacgttcaaattggtgaccagtaatcactttgtggtattcatcaaaattcgtggccccgttcccctcaacgatgatcgaatccgcaattgaatgcccattttcatcataaatgttaaaaatataaatttatccccataatttgctattaaacccatttaccaatagctagataaataaatcatctttgttataacttatttcctgatcgagtaactaacttttcgctcttaatctttccaaagcttattcaaaaacccatcaaaaaaaaacgccaaacccccttgaatgggtttggcgttttagtcaactaaatttcgtttagccttcatcttttggcgtttgccgcttcttcttccgacccagcaatccggccaacagcaagcccaaaccacccagcagcccaccttggttggtagtggctccagtttggggcagcttgcccttgctcttgtcacgctgcgcggcggcttggtccgttgccgtttgatcccgcaagctgactggagcgctttgcccatgcttagttgccgacgtggacgatgtgagcgacgtggacgtgaagtcaatttcttcagaagcgtaatcatgcagtcccttcaatgagtcactttgtgaagtggacatgctcatcgattagatgcccgattgggaatcaaccttctgactttcgctggccgaaagactgtccgaagctaacgaagcacttgtcgaagctgacgttgaggcactcgtcgaagcactcgtggatgcgcttgttgacgcactcgtcgaagctgacgtcgaggcactcgttgacgcactagtagatgcactcgtcgaagcactcgttgacgcactcgtcgaagcgctggttgaggctgacgtcgatgcgctcgttgacgcactcgttgatgcactcgtcgaagcactagtagatgcgctagtcgaagcactcgtcgaggcactcgtggatgcgcttgttgacgcactcgtcgaagctgacgtcgaggcactcgttgacatgctttgactttgtaccgtgctcaatgacgcactttcactttgtgctgcacttaacgattcacttgtactaatagattccgactcttgccttttgcttgtactagtagattccgatttcttcagggaatgactagtgctagcactctccagttgacttggaatcgtcgaatcaatcgtcttattgtccttatttaaattataaacttcctgtcctactaactcaccttgtaaattcttccacccatcttggtaggagttagcaatcgcatagaccccgagaaagatcctttattagcccctgccgctaatttggcctgatcagcattactatgtttcgtcgtaaaagtaatcgtgtaagaagcgttttgtcccccggtcgtattcccccacgattggagatacatagccgtcccaatcgtactcttatcaaaggaagtcgtaaatggcgcggttccatttactaaatcaaatgatggcggattccctccaacatttgcgttatccatttcgttactataagcaaaagcatcaccatttttatcgcttccccggcccgaaaagaccgagttatcaaagtcgctacttgacatatgccaaatatcggcataccgcccgaagtgatagtacagattcgtggtgttaccgattaccccgtttgttggattaacgtccctgggcttaaatgagatgtctgattttggattgacgttccctgagtcgggatcatccgctgaatcccgcaccttcacaccgcccccggtcccttccagttggtaggtcgttcccgggatcatgctggtgtggatattcacatcaccaatgatttggtagtccttggttaggtaaaagcccatttgaccttgttgtagtgggtatttagaagccgctccccagcccttgtaccagaccccctggccgggataaaaggtaatcttccattttgtatacccgtcccccaagtcgcttttttcgactttaatattttccggtgcattatatagttgtttatcattgtcattaccaatagaattattacgcgcggtataggcatttaagttcgtccacagtcgatccgaccctacgatccacttataattaccgttccacaaagccgctgtatcaccagttgctgtattatcatctggcgttaaaaagttgtcactccctgtggctgaattagcatcaaaaagggccatttgagtggccaattgttcaggcgtgatcccagcatcgatcaccgtcatcaacgattgcaattcacttaaaccgtagctggcatcactttcagtgacttgattcttggccaagacggcttggtattgggcaatcgccgcttggtaggcttgctgatagacactggccgcgttcttgtaactgtccgtggccataaaggtgttggcttgggccaccagttgctttaattggtcgacctgcgatgtggtcgtcgtcgccgtggttgccatcaggctatcggtgctcatcgtctgactggtcgtactcgtggtcgtttggctgttggtactcgtcgtgctggccgattccttggccgaagtcgaattgctggttaaggacgcactggtactcgtggcggacgtcgacgtgctagtttcactagtggatagtgagcccgaagtactggtcacttgattgttggcggaagtcaaactaactcgatcagtattcgctaaggcactggccgcggcattattcgtggccgtcgtttggacccccgtggtcgtggccgccaacgctccggttgaagcaaccgtgccgccccccaatcattgccccggcggctaagacccctttcagcaaggtcgccgactttgaatccaagttcgcttctgattcatccaattgcaccttgtgtggtgccgaatgcgttgcgatctttagtaaacccacccgggttaacaaacattgcacccattgcttccctgacttgtacaattttacccgagtagtccgggagctttcggtgatcgtttccttttttgtccgtttcaagatcccacgtcctttcatttctttatgtacgcttctagtcagttgccttgcgctcaatatttatcaattgattaacccgtcctgcgacgctcgtcccaatttcaaacattcttgtcagagatattccacgattacgtttagttaataatttcagcgctttctttactcgttgttgcgactgtttagctggacgggcgtaggccccattgtggtctacacccaacgaaaagccaagaaacttcaaccgtagagggctaccgactttggttttatctgggttcactttaactttcaagcgcttttctagaaactgggtaatgcttcgcattactcgttctccggctcgttgacttttaacatagatattacaatcatccgcatagcgcacaaagtgatgaccacgtctagtcaactctttgtccaactcatttagatagatgttcgccagtagtggtgacaatggccctccttgtggggttcctttttcactcttagcgaaaagcccatggtctaagactccgctagttagaaacttacgaatgagtcttagtgtccatgggtcatcaatatattgttggagatacttaatcattaagtcatgattaacgttatcaaaataggcttttaggtctaagtcgacaactcttcgatagccttgattataaagatctactacttttgcaatagcgtcatgggccccacggtggggacggaagccaaaactattatcagagaaaacacgctcaaagataggcgtaagaatttgggctacaacttgttgaaccattcggtccaccacagttggtattccaagtcttcttactccaccattaggcttcggaatttctacccgtttgactggtgctggtttatacttgccctcacgcaaactagcgatcagttccatcttattttctctgagatatggcagaaggtcattgactgtcatatcgtcaatgcctgctgctcctttatttctcttaactcgcaaataagcctgattaaggttattgcgatccaagactaagtcttggatagtgacactcatacctttaccttcaccataaccggtactacgcgcccttgtgtactttcggttttccaaacctatcctcgacaagcggtcagcttgttgttctgttttctgcgatcgtcgcacctgattacacctccgatataagttacaagttattgtcgttcagtccttaatctgattactcaaactactatgacctcggctgactcctgacttactcaacgctacaccactgtaccgcttgcttctgtggaaatttatcttattcctcttgtcggaagcttgtaagtcaggcctccccgggtaagaatattagctttcgtaccatgtcatcgttagctttactgagaccaacttcgagtagtattggacttcaacttgtctagcagccttatccagttaatttcagccttatagctacttcttgttcatcgatgcagtactttgccttagacttccttcagattccacctcacggtggacacccttgtcctcagctcatggttccgactactacggcccatagcggactttcaccacctagctaatacccatgccgggcgcactacaaaaaaagcacccagctttcacactgggtgctttcgtcatatggcaaacattttggcaaacaaacatgttatttttaatgagttggtcaagttttagcactgccaaaatgccgatatatcgcgcttccaactctaagttacattacaattctattcgtattcgatcgtcgaaggtggcttactcgtaacatcataaagaatgcggttaacgtggtcgacttcatttacgattcggactgagatcttttgaagaatatcccatggaatcttagcgaaatcggctgtcatcccatcaattgaggtaacggcccggatagcaactgcatagtcatatgtccggccatcgcccatgacaccaactgaacgaatacctggtaagacagtaaagtattgccaaatttcttcatcaagacctgcttttttgatttcttcacgaaggattgcatcactttcacgaacaatttcaagcttttcaggagtaatttcaccaataacacgaattccaagacctggacctgggaatggttgacgccataccaattcatgtggaattccaagtttttcaccgagttcacgggtttcatccttaaagagcttgcgtaatggttcaattaacttgaaaccgagcttctttggcaaaccaccaacattatggtgagacttaattgtctgggcggtgtctgttccagattcaattacgtccgtataaagcgtaccttgagctaagaaatcagcatctttaatcttcttggcctcttcgttaaagacttcgataaattccttaccgataatcttccgcttttgttctggatcggtaataccttcaagcttacctaagaagcgatctgctgcgtcaaccttaataatgttaacaccaaggtcgcgactcaacgcatccatcacttggtcagcttcgttcttccgtaacaatccgtggtcaacaaagatacaagtaagttgatcgccaattgccttatgaatcaaaacggcggtaacactggaatcgaccccaccagaaagacctaagataaccctcttatcaccgacttctttgcggatttcatcaatctgcatgtcgatgaagtcatccatcgtccagtttgctttagcgccacaaacatcaaaagcaaagcggcgtaaaatgtctaatccgtattcggaattacgaacttcagtgtggaattgaacaccatagaatttacggtcattatcagcaatcgatgcgattggacagttcttactagtagcagtaacttcaaatccagctggggcttgagttactaaatcaccatgactcatccatacatattgcttctttggcaaacctttgaataatacagcctcgtcatcaagtacttcaatatctgctcgtccatattcggagttatcagctttttcaacctttccgccaaggtcgtatgacattaattgcattccataacaaatacctagaatcgggataccaagcttaaagatttctggatcgaccttgaatgcgtttggatcataaacactattagggccaccagagaagatgatccctttaggattaatctctttgatctcgtctgcggttaacttgtgagaaagcagttcggaataaataccgaaatcacgaagccgacgagtaatcaattgattgtattggctaccaaaatccaagacaatgatcttatcaaacgcatctaaattgatgtttgccacaatgacacttcctttgttcaaatttttattcttaaaggctagtttacaggctgaacatggcatggtcaatgattatttaatattccataacaaaaagacgggagctaaattttctcacgcctttttcgttagatggaattttattgaggatatttaattagtgttctaaatcaatatttaatagacgtaattcttcatcaactgcttgtgcctcaagtgttttagtatctttatcagtttttatcatttcgacagcctcctcatctcatttaatctgtatccttcttaagtggtctgtgagtaattgtcaataaaaatgagtcataaatatcacgtgcaaccgtttcgaacattgatacattaggattaaaaagatttattttttacttttactagatgttttaactagattttctaatgcagaatttgtaatccattccaaattcggttgatttgaatgcgctttctgcatttgataaaatttagttagttattttttacttgaggtgcaatatgtttattcggacaaaatatcttaaccaactaataaacagcatgaaccagtcaacaattaaggttcttgttggcgttcggcggtgtggtaaaacgactattcttgaccagtttcgggcaactctccggcgtcaagaaatttcctcaagtcaaattcaagtgatcaactttgaatatctcctagaaaatgaattatgcaatccagaatatctcttacaatttattcttgatcgacttagtaaacaccagatgaattatatcttccttgatgaagtcgaagtggttccccagtttgcccgcgttgtaaatgccctaaattcactctctaatactgatatctatattacaagttccaacaaaaccattttggagaaagaaaatcttcaacaaatgatttcttatactatcatccccgttttcccttgcagcttccgtgaatacataaaaaggaaccaacaagaagctgattcccaatcgttatatcaatatttaaatgagggcgggttcccctatactcacgaaatccacggtccaatcaacctccgcaattacgtgaatgggatcatcaacacaattattattaccgatttcacccagcaggcgaccctttgcaatccaggcctgactaagcaacttgcccatcacttagctcatcatgctggaaccacacaaaatatctcccaaattgtcgatagtcttaaacgtcaccacatcactacttccaataagacggtcgatttttatttacagttcttacagaggtcctttatcttttacccatgcaaagaatatgatttttcccgtcgccacgtcaaaagtaccaatattcgttattatccggtagatcctagtattcggcaagctctcacactgaaaaagaatgtcctttctcaacgaatccttgaaaatattgtctttattgacttattgagccaaggctatcaagtatatagcggccgcatcaaagataatgagattacctttgtcgcaattaaaaatgatatctttacctgtatccaaatcgcttattcgcttgctgatgatggtgcctatcgccgggcgatcagcggattacggcaactttcctcaaaatataaaaagcttttaattacagtaaaaccagcgctcaattacgctggtttagatcctgatattgaaattattgacttgtatagttggctaaccaattaacctcgtcgcagataaagcttatccacgacatgtcccgttgtcttatgtaaaattacgtcagcacgacttttggttggaaggataaactctcgtaaattaggaaggtcgacgcgttgccaaacatcctttgccattttaaatgcttcctgacggtcacccttcgaataaggatagtaatagtttgatgggtcagtaaaggctgtctctagcaacatcccaaaccgttgaagataccaatgttcaatcaggtccggatctgcgtcaacatacaatgaccagtcaaagtaatcactgacatatagttgctggttacttggcaattgcaacgtgttaatcccttctacaatcaatatgtctgggcgatcaattaccaagggcttatccagctgaacatcataaacttgatgggagtatgtaggcgccttgacaactggttcccctgccttaacatcattaagaaactggaggagcctttccatgtcatatgattcgggaaagcctttccgatccatgatcccccgccgttttaattctgcattaggatataagaacccatccgttgtcattaattctacccgcttatcaggcagcatcttatttagtaagatactaatcaaccgagcgatggtgctcttcccaactgcaaccgaacctgcaataccaataatatatggaatgcgcatcgtggaacgctgtaaaaagtttgccttttgcatctgccattccaaaaagttctggtagcgcagttgaattaattttattagcggcaaatatacatcttgcacatcctcaattgaaattcgatcattcaacgatttaatttcatccaagttcccctgggttaaccgtactgaatcagttgggaaaaagccgtgccatgtttgccgatcaaattgttcgtagttcatccattcatccattatgcaaaatcctttatttcacccgtcaatgaaaacggttactcaagtttaatagtaacatattataaacataattaaagctcaatctagcttgtgaacacctaaacattttaccagataattagcgcagcgcaactgtttgaaataaaaatggagactagtactattactggcctccattttcatttgattatggtttagggaagtttaatttcggataattctttaactctggtgcatcggttgtgtaatcatcgaaagtactctggttattattttccgactttaaacttgtcttctgtttcttttgctgcttctgtaaattcttcaagctcttcttaaggttataagtatattgttttttatcaactttcttaaatcctggaagtttgtagaaccgaagcaagtcaccattcacgactttatctgataatccaagatcagttgtaacgtatttttgaatcttaccaatttctttacgttgcgctgcggtttggtgagtaatctgcttaccattcttagtgtaatagtagtcaccattatacttagtgtattttggcgttacccaatcaccatttctaaacggtacaatttgcttattttctggtgagagcaagtcttggccgaattgaatataattcttagagctaattcctaacaaatcctcaagagtaggtaaaacatcaatttcaccaccatacgtatggttaatgccaccttttaggccaggcatattaatcataaatggtactttttggaacattgctagatcataattagttactttcttcttacctaagatttgcgcaatggctggttggtggttattagagattccatagtggtcaccataaagaactaacacactgttttgccgtaaccccgtcttatcaaggtaatcaagaaattcgccaagtgattcatctaagtatcgtgcagtttgaatataagggtcgaccgtgtcatcaccagtcttccacgcttcgatatccttattctttttatcaagaatatatggatagtggttagtaactgtgatgatctttgcatagaatggttgtggaagctgctcgatatagtgggctgattctttcatgaagatcttatccttcattccatatccagcatcataatccttggtctttgggtaatactccttactaaagaagtattggtaaccaaaagacttataagcattatcacggttccagaaactaggaacatccccgtggaatgaggccgtcgtataacctagtttttgatgaagaagcgctggcgcagattggaaggtattagtcgtcccatcagtaaccattgctgatccttctggaagaccaaatagcgagttttcgagcattgtttctgcatccgccgtctttccttgaccaacttggtggaagaaattatcaaacgccaaagtatcattagcatggtacaacttattcaggttcggcattacttcttgaccatcttctttatagtcgatcatgaattgctggagactttcaaggtgaatgataaaaatattctttcctttagccttaccgtaatattcaacgtttggcgtagcataattactatggatgaaatgcaaaaccggctttaattcgtcacgattagcacgcgcttttactacactgttattagtcgtcttaaccccatcataaactgtatatgcttcgagtcctagatacttaacaatataattattatcaaatgttcgcgtaagtagttgtgaacgatcactttccgccattcctaagttaactccaaatagaacaaagccaagggcagtaatcgtcatcgcatatctaaccttaaagcgtcgcatatcaacacggacaaagtggaaaaataagatgagtgctaaaattacaacatccaggtaaaccaaaaagtcttcgggacgtaatatccccattaaacttttaccaagattatttgaagccgctccagatccctttattacgttaaaggtaatgaaatctgaaaattctcgatagtacaaaatatttgcaaaaagccatgtcgacaatgccgcattaattatcaacatcatccaataggacaagcgtccacggaaatataatgcaattcccaaaaatacaagggcacttggaatcgtattaaatgctaaaaggaattgttgcatgcttccttttacacctaaattaaattcattttgataagcccaatagctctttaaacaaaataaaagtacaacaagcagaaaaaaaccgagcttggtattcaagacacggcggagcttctgcaacgctgttttcatagtcgttcctccataaaaaaatatcattattaacaataatacactaactagctaaccgcaaccgtacaattttatttttccaaaaagttaaaaattctgtcacttttctgtcgtagttaaccttttgaaaatagatcttaaatgttatgattgagtgtcgttaattaacagaagggactgagcaccatttcaaagaaaaaagcgaatttaatgttattactggttgctattctatggggaagcagctatgtatttgccaaactaacgattcaagcagggatgcattctggagttatcaatgcttgccggggaacaatgtgtgtaattgccggttatcttatcttccataaacagatcaacaaaatgacttggctggatttcaaactaggagtccttatgggaacaattaatttcctgggttattttttgcagactgatgctctccgttatactactccggctaaaaatgccttcttgacaaccttatatgttgcaattgctcccttgatcttgtggttgttttggcatgagcgtccacaacggaagacatattttgcggtcgccctcgctattatcggaatggctgtcatcactaatgttgctaatactggccttcaattaaattttggggactttctaactgttgtttctgctattttttgggccttacaattaatcttctttggaaagtacgcaccgaaagtttctagtccctgggtggtaatcttcatgattggcctatgtcaaggcacgttcggttggattacgactggattatttgaacgtactaaccttacacaaattcattgggttcaagccctgattcccctggctattttagcgatcgtcgtaaccttcttagcgcaaggaatgcaaattacagctcagcaatatactgatgctacatctgctggattattattgatgttagaatcattttttgccagcaccatgtcagttatcatgggctatgatccccttacaccacaactaattttgggtggtttaatcttacttttagccaatgcaattatgcaagttaatctccaagatgtgccatttttaagaaaacagaattaaaaataacgaggatgaaaagttttttcatcctcgttatttttatttgcttactttcttatcttccttggcaaccgctgcttgagctagcaagttgacatagttaaatggtcggtcaaagtttggctggaacattgtatcatacattccaagaaactcaattgtattttggttctgaatgcataacgaaatcagacttaaagtttctgaaatatcgtgtttactcatcatctgtgctcccaagattcgttgggtatccttatcccaaaccaatgacatcaggaccggcgtggtagttggtataaagtgcaatattactcttgccatttatttatcaacattaactttttcatattcatctgtcggcacttgggtcagcaaactagttgtcctgccaattgatactaagcttaactcatgcattgctcgagaacaaattgtatatagcaattgtcgctcatcgttaccatggtattgctgatcattcgcattccagacaataaccgcatcaaattccaacccttttgctagatatgccggcacaacaattggcccctttactaaccgttgattctctgtccgaataacggtggtcttgatattattggcatttaacttttgatacaactcttcactgtctttgagatctttaccaataattgcgacggcatcatggtcattctgatacttattaagaatattaataactgccgctaccccttcttgttcatccttagtttgataaacttgtggcttattaccttcacgttcaaaggcttcaattgcttcaccgtcaattaaaatatgcttagtaaagtcggtaatttgtttcgtggaacggtaagacttagttaattggacaaccttcgtcttttctggatcaaacatcgtccctaactgctttaatagtgaccgactattctcatgagtgaaaatcgcctggttaaggtctcctaacaatgtgaatttagcacggggaaaacgatatttaaggtaagctaactggtaagcatcataatcttgaacttcatcaacaaaaacgtaacgaatatcacgttgaccacgctttccagtaatcaaatcatacaggtacaggtaaatggtaattccgtttgcactgatatttcccttctttagctcttcttttatcccatcaacataacctttccattgctctgcagaaataccgtattcagcaatattaacaagttttggagttacccggagaaagtgtaaaaattgtccattgatgttaagccactgattatgatcgatggctttttttattggcataaatgcccgcataacgatttgacgcgcaaggaacttgtattctttatcttcatcctcaaattcacgtggctggttattaaataggttgtcgatttcttctttactcaagctttgaatttcatcctctacccatttgttgcgcatttcagatccaacacggtgattaaggtatttaataagagcttctttcgttccatccaacctatttcccaggttatagttattgttaaatgagtagtaaatctccttaatcttctctttgctcaaaaagactttaccattaaacataaggttgcggaaacgcatattagcatgaccaagatggttagcataacgctctgttgctttgaaatattgtaagctagttaatagttgttgtgcattcttagccgtttcatcttggtgactttcaaaccgttgttctaagttttgaacatgaagctttggtacccgacgattagcaaactggaagtaagtcatctggaccatattatgctcacccaattccggtaaaacttgatcaatgtagtcattaaataattggttaggtgaaaaaagaacaacttgtgaagaggtcaaattcccccggtaacggtaaagaagccaggcaacccgttggagaactgcagctgtctttcccgagccagcagccccctgaacaaacaacaattcatttttagtgtcacgaataatttcattttgtttccgttgaatcgtcgttacaatgctcttcatcttggtacttgaatggttaccaagagcatcaagaagcatctggtcgcctacttgttcgtcggtatcaaagatggttacaatcacgccatctttaatttggaattggcgcttaagagtaagatcaacctcttgttcacctaccggagtctggtacttaactttcccgagctttccttcatagtaaacagacgaaatcggtgctcgccagtcataaacaagaaagtgatctggcttatcggtaaaggatgcaagcccgatatataccttttcggattcattggcacctttttcacgaaaatcaatgcgagcaaagtaaggtttcttttcaagtcgctgtaaagttgctagccggtctgcagcgtgttgccagctattttgacgttcatctagcatctgctgttgagcacgaaaagacatggccgtatccatcatgcctgaataagtagtggtatttaagtggatatcatcaatttgcttattgatgcccttaatatcatgttgagccgttttaatctttttttctgctttttgttcggcctgttttactttatcaatcacattatcaaggtacttttgttctagttctttttcagttttcgtagacattacatactccctacctttcatcttcaggtcgacttacttaataatttatcttaaaatcatccaattattatatcattttcgccaattagtctgttaactttccgccttctattttttcaattattaaatgtcgtttaattttaatcctaagatcatcaaaataactaataataacgctacaatatattgaagccatgatccaggaggaggaaaacaacaatgagccatattttttatcttctaactcatattgcggaaataattattcccatgtttgagtggatgggcgcttggagctatgttctcctttttatcctaatttttatggaaactggattagtgattttcccatggtttcctggtgaatcactcgtctttttaacttgttctttcattgcttttaacccgatcttaaaaatggaaatcgtcatccccgtcttcttttttgcggcgctaattggtgacacagttaattattatattggtcattccctttctcattggcaatggctcaaaaaaagaatggccggtccccgttttgagaaagcacaagaatttttagcccgtcatgggatcaaagctgtagcattagggcgatttgtaccgctcattcgtacctttgtccccttaattgctggaacaatgcagtttccgttccatcgtttcacagttggcaatattatcggcgttactttatgggtagcgattggtgctggatgtggatattactttggaacaattccgtttgttcgtcagcacttctcacttatcatcttagcatttgttgtgtgttcactgttaggagttggcttgttagcacttatcaaagcgattcgtcaacgaattattaagcgaaaccgaatgctataattgctttttcttcagcgaaatcatgttaaaatgtaataagtatttttatttcgcttaaaggagtgctgtaactatgacaatcaacgtttattttgtacgccacggacaaacctatcttaatctctacaatcggatgcaaggttgggctgatggtccgctaacgccaaagggtgaagaagacgctaaacgagtaggacgggcgcttgctcctattcaatttgattatgtattttgcagcgacctcgcacgaacagtttcaactacccgtttcttgcttgctgaacatcctggtaataatccaacgccaattccagagccagcgtttcgggaagaattctttggctactttgaaggagaagatggccaacattttgctgactttcttggcggcccagatggttatcatagctttgcagaaatggttgccggttggggtccagacaaattaaaagataagattgcagccgcggataattatggtactgctgaagaccatgttactttctggaagcgggtagataaaggttttgaccgtttacgagcattgccagacggatcagaagtactagtagtttcacacggagccactattcgttcaatcgtccaacgctattctgacgcttacgatccaggcgattcaccacgtaacggaagcatcactaagctaactttagataagaataatactactgttgatttttataacaaacttgaattaccagaataatatccataaagggggaacactattcttcaatggagactaacatacaaactgcagaaccagtaattatcactggcttaaataccggtcaagaagactttgactactcaatggtcgaactggctgaactagcacaagcaaatcacatggaagttatcgatcggattgatcaagtcatcgatcgtcctaatcctgctacctactttggaaaaggcaaagtcgaagaaattcgtgacgtggctgatgctaatcacgttcctactattattactaatgatgaattatcaccaagccaattacgtaatcttgaagaaggaaccggatgtcgtattctagaccgaaccgctcttattttagagattttcgcaacccgtgcgcaatctagagaagccaaactccaagtacagatcgctaaactgcaataccgtttaccacgattgcaaactagtgcaagtgagcggttagaccagcaaaccggtggaggaagcggctttactaaccggggtgccggagaaaccaaacttgaaatggatcggcgaactatccaacatcaaatttcccaccttcgtcaagaactggctgctattgctaaatctgaacaaaccaagcgaaaacaacgagtaaagagtgcaattcccacagctgctcttgtcggctataccaatgctggtaaatccacgattatgaatggcctcgtaagaaaatatggagctgctgaagaaaaaactgtttttgaaaagaatatgttatttgccacccttgatacaagtgtccggcaactaacacttccagatcaaaaacgcttcttactcagtgacacggtcggttttgtcagcaagttgcctactcaccttgttgaatcatttaaatcaacacttgcagaagccgctaatgctgacttactaatccaagttattgattattctgatccacattacaaggaaatgatggaaacaactaacgagactttaaaacagattggaattaatgatattccaatgatcaatgtgtttaataaagcagataaaactgaaatagaatttcctatcctcgaaggtgacgatcaagttgtaatttcagctaaacaagatgcttcattagatcttctcgttgacgttattaagaagcatctctttaaagactatgttactaccacgcttttaattccatttactgatgggcacgtcgtttcttacctcaatgaacacactaatattttagatactacttatgaaagtgatgggacattattaacggtagaaatgtcagttcaagattatcaacggtttggaaagtatgaaaagaactaacataaaaagcagcgatcaatttttggccgctgctttttatgttagtctatctctctgcttttactccgaaaatcaaggagacaatcattactaagattactgctccaataatagatggaataattgccattcctgctacttgtggtccccatgcacctaacactgcttcaccgattgacgagccaaccagtccagctacgatattactgataactcccatcgatccaccgcgacgggttaatgcaccagcagcaagaccgatcaatccaccaacaattaaaacccaaatccaatgcataattatccctcctttttatcttccaatgtctctttaagatcagttgccttatccttagcttttcctttagctttctgcaactttccctcagtttcgcgggtcttgtagttggttattttaccttcaacctcttttaatttacccactactttatctttaattccatgtttatcgctagccaatatcatcagtcctttcatctattcttggctactagtggctgacaacattttattaatttcgctcccttctataatgactagtgctttcaacagttttaagtttaacagtctcccaacaagaaagcgatatcttaataggttacttaagttttctttaataattttatttatgtcttaattaaaaagaaactctaccttcataaattggtagagtttctttttattcttgaacttaattacattcttatttcatttcgtgaatgtttgccttctaaaatcgtaacagcatcattcaaactaatctcgaccatattgcgaatagatgtttcggttaggaacgcaacgtggggtgtaacaagaacatttggcattgccgctaatttcttgtaatcatctggaatttgatctggtgtaacttgcttcccaaagaaagaagtttcgtcagctaatgtatctaggccagcacccgcaatttctttattttccaatgctgaaattaagtccgcggtatttaccagttttccacgagccatgttaatcaagtaagcattgtctttcatcatcttaaattgtggtgctgcaatcatgttttcggtacttggtaacaacggtgtatgcaatgataaaatatccgcattcttaacaacagtatcgaaatcggtatattcaacgtatggttcatattcgacattatacgatgggtcatacgcaagaacttttgcgcctaatgctttataaatctgagcagtggccccaccaatattaccaaggccaacaattcccacggttaaattgtaaatttcattactgatcaagtcatcgctccaccgaaagtcgccatggctcatgcgttgttcgaattcaccaatccgtcgtaacaagtacatcgcctgtgtgacgcccatttctgcgattgcccgtggtgaataaatagggacattcgttacaatgatgccatttgctttacatgcatctaaatcaaaaatatcaaccccaaccattcgagcagctaattgctttattcccatggctgctaattgttcatacagttgttcatccccaagttttgttgtttgctgtaaggaaattccatcatatccctcagcaagcttaactgtattagcatttaatggttcagtaaccatcttgacatcattgtctgtcttctttgcccatgcttcaatataaggcttttcagtatcacgaacgctatacattattaatttcatcagttttcccattcctttcataaaaactgcttacattaatagcttagcactcctttacttaattatcagtatttaagcaacaaaaaagggtctgtgacttaagccaagttactttcataaaagacaaatggcgcagtacaacaatggcctccaacgcccggtaaaaccgaacgttggaggcctactgttgcttgcgggggctcccagaggctagcttcgcgtcgaaaaacgaagtcacgagtgacttctgtctcgctccctctgttatctttaattattgttcaccgttgtctccttggtttgggcgacgttgttgaaggtgcatgccgtcataatcgccttctggtccaagtagttcttggttattatccaattctgagcgaccagcatagtgatggtgttgtaaccaaatcatgccaactaataacaatgcatagaagacaattgcgattacgatcagaacagtgttacagaacatcgtgtaatgtgctcccaaaccaccagaaattgaatcacggagtcctaagattgagtaagtcatcggtaagtaccagtgaattacattatagaacttcattgtaatttccattgggaaggtaccaccagatccacctaattggagcattaagagaaccatggcgaagaatcgaccggggttatcaaagagcattgaaaggaacataacaattgccattgaagctaacccaaagcatatggttgtcgcaaagaatgcaactgggtgaataactgtaagtccacaagccatcataattgcatcttccgcgattgccattgcagttactaccagtgatccaactgttaccttacttgcccaccaagcgattggagctttaccaaattcagcaacccgacgaattgggtaaacaaagttaaatacaagtgccccaacatagattgctaatgatagaacgtatggtgctaaggcgtgaccatagtttggtacataactgtaatccgtgtgcttaagagcagttggttctgcaaacatcttggcagtccgtggtgaagtcttaataccgttgatttgctttgcaccacctgcaagcgatgtagccagttgagaagcaccagcattcaaccgcgcaattcctgaaataagagcaggagaattatcttgaagttgttgagttccggcagctaattggtttacaccagcaataagagcaggaacttgaccgtttagttgaccaagcgcaccagctaattgagctgcaccagaattcaaggccccgctattagcgttaagctgggcaattccgttacccaattggccaactccggctgtatattgaccgattccgctagccaattgaccagctccggctccagcttgggcgaccccagctgtgtattgaccgattccgctagctagttgattagcaccggctccagcttgagcaaccccagctgtatattgaccaattcctgaattaagcgtaccagcaccggcagcagcactatcaacaccattagtgtattggtttacaccactattaagcgtgcttgctccagaagaaatccgacttgttgcttgtttaagttgatcaacagctcctggcattgccgctagggtacctttatagccatttaaggttgctaataatgagttaatagtcccatctgcattatctaacacagcagacatttgtgagagctgacctaattgttgctgcataccactcaagcttccttgaagattgtttaattgaccaagagttccacttaatccttgaatagcagcaacgttagcactagcattttgtacaatttgttgagcggccttcttagattgatcactagctttatcatcactaagaatttgttgtgctaatccagcaatttgaccatcgttaattgcaatacctttaagcttgtcaccagcaccggcagcaccagataatgctcccgaagcttgttgaagactagcagcactactttgaacaccagcaagagcattcttggcagttgccaaaccggtctggagttgacctagtccttgctgaagattttgtgcttgatccatggcccccataatcccgttaaagttaatgtttcctaattgactgttaacggttgaattcaactgattagcaccggatgctagttgaccagaaccgttccttaagttctctgaattaccacttaacgtattcaaaccactgcttaattggttagcaccggagctcaatgtacccgagttagccattaaagtatttaacccagcattcaactgactagcaccaaaatttaacgcaccagagttagccattaaagtgcttaagccactgctcaactggttggcaccggaatttagtgcaccggaattagccattaattgaccaacaccattgccgaggagactaaccccaccagtatattgcatgataccatttgctaaggtttggctcccggtagcaagttgttgagcaccagaagctaatggtgcaacactaacacgcaaggtttgaaccccgttatttacttgggaaactccggcaacataacgatttacaccatcacttaatgtcaccattccagtaccaatttgttgggcaccatcagcggccttgttcatccccttacctacaacatgcaattgcttaaacattaccgttgcgtaagcgttagtaacttgggcacgaattttttcatttagccgtgtcatcccagtttggacaattacctgtccaatgtagtttaaagaaccattagtttgataatgtaacttcatcgtcttgggatgtttttgtaaaacagtcgttgcattttcagagaaatccttaggaatcgtaacaacagcatagtacttacgatggctcataccatactttgcttctttagcggatacgaattcccactttaattgatgatttttcttcaattcatcaacggtctgtttcccgacatccattttccggccttggtactcaaccggaatgtccttatttaccaccgcaaccggtaagtttcgtgtacttccatacgggtcccatactgattttaagaagaaaatactatataggaaaggtatgaagcaaataaccgttactgatagaagcagtaaacggttatgaataatatgacgaaattcgcctttaatcatgctccacatttaatacttcacctcaaaatttatcctttcataattttagtttgttaatgacttggtagctgctctcgcaaaattaataacgtcctcagttggtacatcataattattgccttgccaccagtaaaaggtcccgataatagcgccactcaatacataagcaagcatctcgggattatcagacttttgcagcgccgttacaattggatcattagtctcaagattgcgccgctctagaagaacctgacttaaaatatttaaaatttcggtatacaaagagctccgtgcactattaggtgctaaatgacggataacatctttatttttatcaatgtatgataataattgcttaataatgtcatcttcagaatctgtattctccgtcaatttattaatttgtgcatttaacgtttgctctaagagatcgtacttatcactaaaatagcgataaaaactgctccggtgcatcaatgcttctttacaaatttgatcaaccgtcaaactttcaaaagaatttttctctaataacgttatcaatgcattttcaaagtcacgaatagttctcgtaacacgcataactcttccctccccaaataatacaaatttaacatgattattctaacttgttgcaattcagtacaacaggggtaattaaagataattatttcatagcgagacaaaaatgaccatttgtccgtaaaaagacttttgtttgtatcttaatcaaacgaaaacaataatatgctcctaaatttaaatggtcaagcacggcagtaataactttatcgctcttttatagtaaaacgtattaaataattattaacttgctaaatctcttttctaaaatacggtataataaaagtattaaagctatgcgattggaggcttcataatggcaaaaactaaaaaacatttaactaaatccaaagataaagtatttcttggtgtctttgggggtatcgctgactactttggtcttgacgaaaccctcgttcggataatcggaattctcattttcgtctttactggctttttcccgctaggagtcttctacctcttagctgccctcgtaatgcctgaatataatggcaataagacaaacaatgatgacaatatcgtcgacggtgaattcagagaaaaataatgttgattgcagcaaaaaagggactgtgacataagttaagttactttcataaaaagcaaatacgcagtacaacaatggcctccaacgtccggcaaaaaagccgaacattggaggcctattgttgcttgcgggggctcccaaaggctagcttcgcgtcgaaaaacgaagtcacaagtgacttctgtctcgcttcctgaactaatcttaggttgttttttaagcattatttcgttgtttataagctacttgaacttgtagtccataatcttcttccgttaaaattgttgagccgcttcgcccagcaatcttattcgggcccccagtaacaactactgttgcaagatacaattgatacttatcatgagcagtatggacatcggttaggccgattttggtaatatgaccaactgggcgccgttccatttggttcatcccgatgtagatttcaagacggtgttgcaactcatcatgaactaattcaaagtatggcggaacagattgtgaattcaaagccgtaactggtttttcagttgcttgatactgttcaacgatttctttttcacttagaccatcatagccgttaacaaacacaccttccattaatagttggtcaacaacacggtgtaagttatgttgttcatgttcgtcaattgctactgctgctgggatcgtgtcggcattagcaaacaagccatttgaccggtttgccaattctgccgctagtcgttgttgtgcatcaagaggcgtcttagctttgccgtcctcaaatttttgaccagtaatctttgcgacacgcggtgaaataaaatcaaatcgtgaagtcttttcaagaaagtaaaagacgaaattaagatagataaaatatgttaatccaatcactgctaagcaatataacaatgcccgtagccaaacatgattcataaagagtcggaacgtaacataaactaaataaatatcgcccagaaaagcaataatgatataaatacgactctttaactttacgtcaaggttaaagtaactcaatgacgagttaatcatatcaagaaaactaaacattaataacccgcctccttattattcagtcgtagtcgttccggtagtattaccaccagtcgtgtcttgtgtcgttgtattattgttagttgttgtaccagtcgattgtgaggtactgtttcgattagcactcgtactttcgtttgtatttgctgatcgatttgtcgatgcttctgtgccagtgtttcctgctgaccgtgtaggttgattagtatccccagtatcgtccgttgtattgttgctattacttgtccgggtagttgatgaattacttgcactctcatcattatcatcacgatcgctttgtgaattccgacttgattgattgctttcctcatcacccgattgctgaaattggcgacttgttgatactgatgttacttttgcaccctcagaagtatgcgttgctttattaactactacattggtggcacccaacgcaagtaccaatgatacaagtgcaaatggggttactaatggcggtatctttgctcccatgtctcattctccttttccagagtatataatacacgaaaactggcccaataaatatgaatttattgtaaagattttttctggcattgggcacatatcccgtgcaattcaaaccgatgcccagtgattttaactcctggcaactgtttctcaaagaatttcttatcaattggtggcatttgaatttcttgaactcgtccacaaatatcacaaataaagtgatggtgatgagtaaaatcacacgaatatttaacctgcatctgatcatgatgttgacgcaattcgacaatgcccaatttctcaaattctttaaaattccgataaatagtatcgtgacttaatccagggaattgttctcgaagatattggtcaatttctacaatattaaagtaacgatcagggtgtcgcgcaactgattcaatcatcattttacgttgcttagtccaccgcaaatgatggtctttaataatggcctgtgcttgatcaattaatttctccaatcttttttcctcccgattaaagatgatattgtatcatattttaattctttttggataatatctgcctaacaattatatctatttgttgtttagtatttttccattgatcattaactacaacatgagcgatcccttttaaagccgctggtaaagcaagatcacggtgatactctttgctatgtaaacgagaacgaatcgcactcaatttatcgccccgcagtgtcattctcttagctaaagaagccatatgggtaacggtcaagaaaataatcactgcttgagcatcaagttgttgatggtaagtaatcgcaccagctgtgtcaagaacaatcacatcattttccccttgtttccatccttcttctaaaccttctaatgaagaaccatattgaaactggtcataagttacttgctcaagtaaatggagttttttcagggaagtcggtgtttcaaaatgatagtctaccccatcttgttcccctgaacgtggtcgccgcgtcgtatgggtgattacccggtgcatatcataatgattttgaagatagttagcgatagttgttttacctgagccagctgctcctgtcacaataaacacatacttattatttttcataattgcttattttaaatgatcgttaacttgatccaataattcttttaaattctcgtaggttaaccgttcacgagcatcttgatagttgaaccatccacaattcttaatctcttctgcttgcagatgaatgtcttccttgttatctaactcggcagtataaagggtcatttgcttatgattgccatttggtaagtcgtattcggtatacaccttaaaacttgtatcaattggtaattctaattgcgtttcttcctttatttcacgaattgctgtttcttctagtgattcattgccttcaacgtgacctttcgggaatccccagaagtgtcccttattttgactctctaagagtaaatactcaattccattttcaccttgacgatatacaactgcgccactagtaacttcaattgccatttttatccctcttttgtaattaaatttttctaatttacttttaatattaactacggtatcattattaattataaacgtggcgaaccatttcggcacgtacaatttattatagcaaaggtgggttaaagatgagcttaaacattatgcgaaaagaaagtcttgatcgatatcttggtgaagacaagcttttcgttaaatcaatgaatgctcgtgatctcatggcaattgggatcggtactgttattggtactgggattttcattctccctggaacaattgccgcaaattcagctggaccaggagtgtcattgtcatttctgttttcagcgattgtctgtgcgctagctgcaatgtgttatgccgagtttgcttctgcattaccggttgctgggagtgcctactcatacggaaatgtagtgtttggtgaattccttggctggttgctgggctgggcgttggttcttgaatacatgttagctgttgcgtctgtttcaacaggttgggcagcctacttcaatacattgcttgaaggatttggtattcatctccctaaagcactctcaggtccatttgatccagctcatggtacctacataaatatcgtggcggtcgtaattgttcttttgattacagtaatgcttgcacgggggatgcaatcctcattgcgtatcaataacattgctgttttccttaaaattgcaattatcttgatctttattattgttggtttcttcttcattaagcccaaaaattaccatcctttccttccataccacatgaagggtgtgattcacggggcaacgatcggtttctttgcttaccttggtttcgactgtgtttccagttcggctgccgaagttaagaatcctaaacgaaatatgcctctaggaattattgggacacttgctgttgcaacaatcttatatactggtgttgccgtagtcctaactgggatggttaagtacaccaaacttgacgttgccaatccagtggcgttcgccttacagatggttcatcaagactggttggcagaattattgtcaattggggctttgatcggaatgttcacaatgatggtttcaatgatctattctagttctcgtttgatctatgcaattggtcgtgacggtctgcttccttcattcttaggaaagcttgataaaaagagccactcgccacaagttgcattatggatcgtggcgattattatcgctatcatgggcggacttgtttcccttgatcaacttacaagtttagttaacatcggaaccttgtttgctttcatgctcgtttcatttgggattattccgcttcgtaagcgaaaggatatcggtaatcgtggaggctttaaggtgcctctctaccctgtgcttccaattctttctggtctcgcctgccttggcatgatgacccagttgcaaaaagaaacatatattggagcagcaatttggtttggaatcggaattatcatctacttcacttacggctactggcacagtaagttagcagataagaattaatagcgtgaactactcggccataaatgaccgagcttctgggaacacgaagtagtatttaggatattacacaagtattcttgctacctaacttacagaactccgttcttttaccaaggctagttcctagccaacggcttttaatcctttttgcaagatgttaactgccgcattaacatctcggtcgtggtgaacgccacactttggacaagtccattcgcgaacttcaagtggcttcttgccactgttaaagccacaatgcgaacagatttgactggtatagtttggtttcaccaagactagttgtttgccataccaagcacacttgtattccagcatcgtccggaactgataccaactagcgttagcgatcgacttcgctaagtggtgattcttttggagattcttggctttcaaatcctcaataacaatcacgtcgtactgcttaactagagccgtcgttagcttgtggaggtaatccttgcgcttgttggcaattcgttgttgataatgggctttaacaagtcgggcgcgttgccagttctgataatcattgagtgctaacttggtatcttggtggttgtgattccattggcgaacggcaacggttgcccggtggcgccgcttgctgaatttactttgccacttcgttacttgatgttctaacaatttagcgttgaaggtaccgtacttgacaccatcagaactaatcgcaaggtcggccaggcctacgtcaagcccgaccatttgccccgttttcggtaaccgttcaacggttgtttcaacttgcagggagaggtagtaacgacccgtcgggtcataactgaccgtataacgcttaattttggcctcaccaataagagtcgttttactcgtgcgtatacttccgagttttggtaattgtaaccgccgcttggcaagtaccttgcacgttgatcggccagtgtaggcctgataggccacatggcggctcttaaagcggggatagccaccttggtgcttaaacaatcgtttaaaggcctcggtaagattatggttcaccactaggaaactggtggaatcactttccttgagaaagggatattcacgcttgagctgtttcaagaggtagttcataccatactcattgacgaagtggctactgggattgttttggtaacgctccttagccatactgagcatttggttccaaacgaagcggtcattaccaaacatttgccataactgatcccgttgggattggttagggtacaagcgaagtttgatccctttaatgaccttgttcattctagttccacctcctttttccgttgatcatcaatgtacttggcaacggcttgttcattaacggccccaatactttcaacatagtaactgggcgaccacaagtgacggccctcctttttccaatagcttcgctgtaattccggacattcccgaaatagctgataggcagtaccgcctttcagccaacgaacaatattcgtcaccgataatttgggtggtgcactcactaacaagtgcacatggtcgtccttcccaatttccatgtgggcaatttcaaagccatatttagcggcgatctcatggataatccgtttgaaggcgatctcgacccgaccggtaaggactttgtttcggtatttggttccccaaataatgtggtaattaaggttgtagaccgatgttcggccatatgtaagtctgtttgtatctttcataccaacgattataccataattcacgtttcccatatacgcccgtcgggcgtaaaaaaggggggcaattcatcacgtccttaaaagaacgtgtttccttgccccttttcaaaaaatttaagagttacgtagagagtgagaaaattatttttccactccctttttatttaagatagtaatttgcattaaataccattttttgttaaggtagtattacttacttttttattcacaaggaggaatcaattagttaggccaaattttgatcacatacgcctaattttttatggaatatacaaagaagaattacaaaaaagcacctttatcatcaattcattttcgaatatattttgccttggctcttggacaaattgcttgtggttttgctcttggaattagtggaactgccctttcccaagcaaccgattatatcaatattaccgacttttgggttggcctaattggtgctgggagtttaattggactcgctgggagtgctttaatgggtaaaatcgctgaccaatttggccggcgaagaatgttgatgctcgatatgtatcttttttctatattttctcttttacaattagtaacaatgaatcttattatcctgtttatcttacggattttaattggtttaatgattgccattgactatactgttgggaatgctctattggtagaatggttaccagcaaaagaaagcggacgcctacaaagccaactaatcatttattggacaattggctttattacttcatatattgctggaattttagtaacagggtttggtgttcataattggcaagttatccttgcatcaagtgtcgttccgggactgatggctgcaatctatcggtcaatcttccgaattcctgcatctccgagctggttagcaagtcaaggtaagaataaaactgctcaaaaactaattcaaaaacaccttggaaaaaaatggggattatcattaaaacaaattcgtagtaaaaagccaaaagctgtctctcttaaaaccctctttaatcccccttatcgccgaaaaaccattgttggtggtttattctatgcttgtcaggcattttcatttttcggtatcagtatcttcttaccaattctcctaaaaagtatgaatcttggtaataacaacctctctgggattatctataatagttgcgtccttatcggtgtaattttcggtagtttaatcttcaagattcttagtaggcggatgtttttggtaagaacatttttcctttcagcagcagccctcattttattaataattggcaataacttttcacctttcttccaaattagcgtttttgcgatctttgcgatagtcttatcctcaggacttgtccttgattatccatatccaacagaactatttgatgttaaggttcgagctagtggggttggtacttgtatcactatcagtcgttttggagctgctagcggaacattcttattaccaatcttaactcatctcggcggtccaattttagcaatgctaatttgtactcttgttttacttataggtggtactatctgtcttttatgggcacctgaaacttcaccaaaatatatttaacattaataatagaatggtcgggaaaattttaaatttttcactgaccatttttagttttaaacatcaatccaatagactaatcaatttttaacaattgaactactcccacttagctaaacctacggtttaatgcttgaagtgggagattctggaaacatcgcatacttaccctaccgattctgaacgaaccttcaagcagaggttacgactattagccaaggctcgtcccgagcctaactttatctatcggatagctaatcctttttgcaagatgacttgtgcagcgttaatatcacgatctaaatgtttaccgcagtttggacaatcccactcacgtaccgctaaccattccgatttattcaatcctaaccgatgattattcttcccacaattagcacaaatttggctagtatatgacggattgacctgaataagctttttaccgtaccagtcacacttatattgcaacatatctactaattttgaccagctagcgttagcgattgctctagctaaatggtgattcttcatcattcccttagtattaagtttttccaacacaatgatgtcgtactttttgaccaatttagtagtgaatttttgtagctgatccaaccgttggttggcaatcttttgccgatacttcgccaccataatacgagctttctgataattcttaaaatcatctaattgccgtggaactaacactttattatgatgatcccaggcgatttcctgctgagcctttaagaaccgacgactacgtaatttctcccaacgatacaactttttatggtatttgtcttcaaaatgattgatcggttccttgcatccatctgaaagattaagtaatgacttaagtcctaaatcgccaccaatatatttacttgttttaggaagagtttggttttcactttccactaaaacagtaatgtaatattgaccagcaacgttcagacgaacagtgacattcttaattttacccattggcaatcgaccagctctaaaatagacgataccgagttttggtaactttatatgatggcaatctaaaactttaatattgccattaacgtactttgaattgtagctctgagaatattttctggatttaaatcgagggaacttattttgacctttaaaaaagcgttgaaaagcatcggctaaattgcgattagcactttgcaaagcagttgattctgcttgtttcaaccaaggatactcaaccttaagttgtttcaacagattattcatcccaaaggcattcacaaatttagcttccggattattcttgcgccgttcaatttgcatattaagcatttgattccatacaaaacgaacacaaccgaaggtttgccagagctgattttgttgtgctgaatttggatagatgcgcattttaacggcttttagaaccattattttctcccttgactttcaatatatcgttttacaacttctaaaggcgctccaccagtgctaattaagcaatagctttgtgtccaaaaggctgatttccaaagatattgcttgatttctggaaattgttttttgaccattctggagctagacgatttgtaagcatttaaaaatttagccatttccgtatgaggcgttgctctaaacaaaacatgtacgtggtcctgatcataattccattcttgcaaattaatgccgtacgcttgtcccacaactacaaaacgatgtttaagatattcagatatttcatcgttaattacttttcgacgatacttaaccaccattaccaaatggtaattaagcaagtatactgaatgctgatttctatctaattctattgttatcaccacattttatagatatatactaaatatatcatagaataaaagaaaaagcactaacgtactttaagagagcgattcatcccctacttatagaagtgggggatgaatcgcaaatttatggataaaataatttgattacaaagcgaaccaaatacggatagtttttgattaatactgctatatttatcgggaacttgttttcgtgcccactcctaataagatggcacaaaagactgttatagcggttccaagcaaatataggcggtatacgttaagaataagccaagagtaagacagataagggtagtcttatagcgagtagttaatggaatcttttgcaatttaggactcaatgcgcctactaacattcccgaaagcatcaattcgataaaaacaatgaaaatccaataagctttattctgttgaaaagcaaatagtaaagtatagataatgacataattcttgatcgctccgagccaaatacgaaatagtttaaaaggttgttccagaatatttcgtagttcaaggataatcccaataattgctagcacgattagggcctagccaaaatcagaaatttgacccgtcttcttaaagaaactaataataaaaaccacggtaagcacagcgatggcaggaaaagccgtttttaaattaaaagagaattttaaatccaatggtgtcttatctcgtttaacaacaacgtaagcgtaaataacttccaagcccaggaaaaaagtataaaaaacaaaaccgacaactaacggcagcttcatcagtaaaatcccgagggcgatcagtccgataattacactaaagcccgcgataacatttactcgcttcaaatcaatcccggaaatttccttattgggatcgccgagcaattttaatcctgtcacgccaaaaccgatcaagatcgccgccaatctagcaagccactcaaagcgaaaataaattccaatagaagcaaggactcccccaataaaagcaataactgaacaaaacttagtaacacctgaccaagaagctaaatttaggcgcccatcgagaataaaaggcattactttttcaacggtgtaaacaaaaatgaacggccaaacaaatgtgattatatttgcatgggcaatgatagagaatgcaaatagtaacgttggaaatagaatatagcttcgagctacaaattcatggttaattgctaaaatcttcttcataagcagcctccgatcactttaccttttatttttagtaaaccacatccccttataaaagaaaaataataggactcctaacatgatttttaatgctagaagtcctagtagctttttatttagcaaacatcttaaattctaaaaataaatcattgtattcacctaaaacgcgtaatggcaaatcacgatatacttgcaaatgcttcatcgttgtttcaggaggatagaaagctttatcatcggtaattttcttgggtaattcttttttagccgctttatttggtgttgcgtatccaacgtattgagcattttgagccgcattttggggatctaacataaagttaataaattcgtaagccgcctttttattacgtgctgctttaggaatcaccatgttatcaaaccatatattgcttccttcgcttggcacaacatagtgaaggtgcggattaatattcatcatttcgcgcgcgtcaccagaataggtcacacccacggctgcttcattttgctccatgtacatcttcatctcatcagcaataatcgcttttacattgggcgtcaactgctttaaatgggcctgcgcaagcttcaattgatggtagttagtcgtattaacagaatgatgctgggtaataagggcaaccgcaaacacatcccgcgcactatcaatcagcatgacattattctttaagcgcggattccaaagttgttcccaatgctggacgtctttgccatttactttttgatcattatagataatacctaacgttccccaaaagtatggtacagaataacgattgtcggggtcaaaagaacgatttaaaaattgcggatcaatatacttaaggttaggtaatttctgatggttaagaggtgcaattaaatgctcctttttcatccgttgaacagtgtattcactcggcacaacaacatcataattagtcccgccttgccgaatcttggttaacattgattcgttgctatcaaaggtttcataatctacatgatagccagtttgatgttcaaatttcgttatcaatgctggatcaatataatctccccaattgtaaattgtcagagtttgttttccaccaccagttttttgctggttgaaagcaacatccccaagcgctagcaaaatacaaataacgataattgcaaggaatgcagtaaatatctttttcattgtgcatccccctctttaacagccacaatccgtgtccgtcgaccgccccgtttactaataaggtaatagccaattactaacagaagcgaaacaataaacatcaacgtagagagggcattgatttcaaggttaattccttgccgcgcccgcgaatatatttccaccgataatgtcgagaagccatttccagtaacaaagaaggtcacagcaaagtcatcaagtgaatacgtaaaagccataaaatagcccgcaaaaatacccggggcaattgacggcagtactacccgagaaagaacttgccagcgactggcccctaaatcataggcagcatctactaatgttggggacatttcatttaattttggcaacaccattaaaacaacaattggaatacaaaaggcaatatggcttaagaggactgagacaaagcctagtcttacccccagcatggtgaaaaagattaaaaagcttgccccaataattacatcgggcgagaccattaaaacattattcaaagataacaaactattcttccacgggcgccgtgcatccttaattgccaaggctcctaatgttccgataatcgttgctaatagtgacgccaaaaatgctactaacaaggtattaataacaatggtaatcattcgcgtatccgcaagcaaatccgcatagtgttgccaagaaaagccatggtatttttccattgtttgtccgctgctaaaggaaaaaacaactagatacaaaattggcgcatataagatcacaaaaactaatgccaggtacgcttttccccatgaccatcgctgctttttcattaatggcgtcctcctttctgtttcttatcaccagtcataaacataataataaacattgcgataatcagcacgaccccaatcgttgaacccattccccaattttgcgttgtgaggaaatgttcttcaatcgcagtccctaaagtaattacacgatttccaccaatcaaacgggtaatcataaagagggagagcgatgggatgaagaccgcttgaattccagcttttacgcccggcatagaaaggggccaaatcactcgacgaaaggtttgccaatgagtagcacccaagtcatagctagcatttattagtgacgggtttatttcagccaggttattgaaaatcggcaacaccataaacgggatttcaatataagcagccacaaacataaaactggcatccgtgaacaaaagctgatgactcccaaggcccataaactggaggaaaccgttaattgtccctgttcgactaaacaagccaataaacgcataagtcttcaataataagttgatccatgttggcaaaatcaccagcaatagccaaaactgcttattaggcaatctattcaaaacataagctgtcggataactaatcaccaatgtcacaagggtaatcaaaaaggcataccagacagagttaagcgtcatcttaagataaacacccgatgtcaggtattcagcatagttattaagggtcagctgaccattgatattaaaaaatgattgataaaagatcaataccaatggcgcaatcacaaataggataatccacaatgcatatgggacgataaacatcgctttttgccgcattagtctccctcctcgtagctatcaaggcgagcatcaaaatcttcttcgctttcgttataccgcataacgtgaatatcttcgggatcaaatgtaatccctactttagcccctacctttgttttatgaatagaattaatcttccacttatggttacgttggtcaatcaccgtaatttgataatcaacgccacggaaaagctgcgtttcaacagtgccgactaattttcctttctcaaccgtcgtaatgtcaagatcttctggtcggatgacaacttcaaccttttcgtttggtttcatccccgcgtcgacacaatcaaagtcttgaccattgattgaaactacatagtcttttttcataatgcctgggacaatattgctttcaccgataaaatcagctacaaaatggttaagcggttcatcataaatatccacgggcgtcccactctgctgaatcttaccatcattaataatcataatctggtcactcatggctaatgcctcttcttggtcatgggtaacaaagataaatgtaatccctagccgccgttgcaattgccgcaattcagtctgcatttgaactcgtaacttatggtccaacgcagacaaggcttcatccaacaatagtactttcggcttattaactattgcccgggcaatggcaactcgctgtctttgcccaccagacatcgcggtaatttcccgatcatcatagccatctaattgaaccaggtgcaaagcttcttttacgcgttgtttaatttctgattttttgacacccttaatttgtaatccaaaggcaacgttttctgccacattcatatgagggaaaagggcgtaatcttgaaagacggtattgacttgccgttgattggctggaatatcattgatttgctttccatcaaaataaatttttccactactaggatgatcaaaaccagcaattaagcgcaaaatcgttgtctttcctgatcccgatggtcctaataaggtatagaatttaccggcctcaatttcaaagcttatatcacgcaacacaacgttatcatcatactgtttgcttacatgctgaaattccattatgttttttaccatcagcgtttccccaatcatcattttttaaactaagtcttagtataaagtatacgccttaaatcgcaacactgtttatcctaagcaaattattttgaactactcccacttagctaaacctacggtttaatgcttgaagtgggagattctggaaacatcgcatacttaccctactgattctgaacgaaccttcaagcagaggttacgactattagccaaggctcgtcccgagcctaactttatctatcggatagctaatcctttttgcaagatgacttgtgcagcgttaatatcacgatctaaatgtttaccacagtttggacaatcccactcacgtaccgctaaccattccgatttattcaatcctaaccgatgattattcttcccacaattagcacaaatttggctagtatatgacggattgacctgaataagttttttaccgtaccagtcacacttatattgcaacatatctactaattttgaccagctagcgttagcgattgctctagctaaatggtgattcttcatcattcccttagtattaagtttttccaacacaatgatgtcgtactttttgaccaatttagtagtgaatttttgtagctgatccaaccgttggttggcaatcttttgccgatacttcgccaccataatacgagctttctgataattcttaaaatcgtctaattgccgtggaactaacactttattatgatgatcccaggcgatttcctgctgggcctttaagaaccgacgactacgcaatttctcccaacgatacaactttttacggtatttgtcttcaaaatgattgatcggttccttgcatccatctgaaagattaagtaatgacttaagtcctaaatcgccaccaatatatttacttgttttaggaagagtttggttttcgctttccactaaaacagtaatgtaatattgaccagcaacgttcagacgaacagtgacattcttaattttacccattggcaatcgaccagctctaaaatagacgataccgagctttggtaactttatatgatggcaatctaaaactttaatattgccattaacgtactttgaattgtagctctgagaatattttctggatttaaatcgagggaacttattttgacctttaaaaaagcgttgaaaagcatcggctaaattgcgattagcactttgcaaagcagttgattctgcttgcttcaaccaaggatactcaaccttaagttgtttcaacagattattcatcccaaaggcattcacaaatttagcttccggattattcttgcgccgttcaatttgcatattaagcatttgattccatacaaaacgaacacaaccgaaggtttgccagagatgatttcgttgtgctgaatttggatagatgcgcattttaacggcttttagaaccattattttctcccttgactttcaatatatcgttttacaacttctaaaggcgctccaccagtgctaattaagcaatagctttgtgtccaaaaggctgatttccaaagatattgcttgatttctgggaattgttttttgaccattctggagctagacgatttgtaagcatttaaaaatttagccatttccgtatgaggcgttgctctaaacaaaacatgtacgtggtcctgatcatgattccattcttgcaaattaatgccgtatgcttgtcccacaactacaaaacgatgtttaagatattcagatatttcatcgttaattacttttcgacgatacttaaccaccattaccaaatggtaattaagtaagtatactgaatgctgattcctatctaattctattgttatcaccacattttatagatatatactaaatatatcatagaacaaaagaaaaagcactaacgtactttaaaagagcgattcatcccctacttatagaagtgggggtattctcgcaaatttatggataaaagtgcgataattaatatatcaaattttatacgaggtgttccagatgaaaatcaatcaatttagtattacttcgactacaccacaggcacggcgccaagaattaatgcagattcacttgcttcggaaaaacgaagaacaaaatttaacaccgaacgcaatgtttgaaatcttcttagcacgaattcatatggcaagtgcccagccgatcatcactaaacagtggcttcatgacctattagctactcctgaccttgctcttgatgattggtttgaccagaatcaaatattaaccgatgaagtattttacctcgtcgctctccaactactcgattttgaggccgcagttgattttgatattacagatccccttgctacagttaagaaaattggcttgccagtcgaatcacatcaaaaatggacaaccgcaaacgttaccgatgctttttaccttcttttaaatactcataacaaaaatggtcaatcgcttattgatcatttaacggcagagggctttatggcttggagttaccagcttccagctgaacaaaaaccactctttttcaatggaaagccacttgctagttttgaccctgctaaattcattcgtgaggttgtttacattgagaccgatatggatactgattttgatggtaaagcagatttagttaaagcggaaattatgcggccaatcgaatcggaccatggactaaaagttcccgttgtctttactgctagtccttataatcaaggaacaaacgatgaatggggcgaaaaagcaacgcataacgtcaatcttcctttgaaacataaggatcctgattatcaggccccgactgaagaaaaatttccgactgacttttcacgccaaaaagttactggcgaaagccggcaagctactgagacatttagtaccacgccagcctacacactaaataattacctcgccgcccgtggttatgcggttgtttattcagccggaattggtaccaaagattcggatggtctgcaaacgtgtggttcttcagaacagactgatgcgatgaaggctgtcatcgagtggcttcatggtgatcggcaagcctttactgaccgtcatagcggtaccacaatcaaggcgacctggtgtaatggtaaagtcgcaatgacaggacgctcatatctcggcactctagccaccgctgtcgcaaccactggtgtacctggcctcgaagcaattattagtgaagcggccatttccagttggtatgactattaccgggaaaacggccttgtccgggcacccggtggctttcaaggggaggacgcagatgttttagctgacgaaacattcagtcgaaccaaacgtccagcagactaccgccgaattgaaaaagtaaatgataaatatattgctaaaatgcaaggagcaatggatcggacgtctggtaattataacgagttctgggaccaccgcaattatcggcatgatctcgaaaacatcaaagctgccgtgatgatggtgcatggccttaatgataccaatgtccgtcctagtaacgttaaagcactttatgacggcactcaaagtttgccgattacaagcaaactcatccttcaccaaggacaacatatttatatcaatgcctttcgttcattagatttctctgacatggttaatctctggcttgctaataagctctgggggcaagaaaatcatgctgatgataccctgccaagtgttcttgtgcaagacaatagcacccccgaaacttggaccgcatatgatcaatggactgcaggcgaacaaaaacagtaccaatttaacgaccatcgcctaacgaatttgcccggactaggaatccaaagctttaatgaccaacaaccagaagaaaagtaccttcaatggtgtaaacaaccccaagcatgggcaaaggcactcgtgaatgataacggtcaatttagtcggcgcttcgtaactgctgtatttaataatgatacgcttctccgtggaactccgactgtcacattaaaagtagcttcttcgaaaaattatggaatgattagtgcccggcttgttgacctgggcagcagcaaacgccttacaatgtcgcctgttttgtttaatcgtaatggtcttgagctaggttatcactggaagacagatgaccttcgtgaatttaaattagcaaaagaaataactaattataaggtaatcgcaagtggacatattaatttgcaaaatcgaaacaatccagcacagattgacgaattagccgctaatcaatttgtcaccgttaagtttgatcttcaaccaattttccaccgaattgtagctggccatcaattagggatcattatttatagcactgattacgaatacacgcttcgtggcaacgaacggattgaatatcaattagagctgaatggctgtcatcttgacattcctggcttcagcgttttagcttaaaaagacagcgcgttaaaactagttttagcagaattcagctaattgcggtagaatagttagtattaccaataaaaaggagagattcgagaatgaaacaaggcactaaaattattacccttgataacggctatcatctgtggacgaatacccaaggtgaaggtgatattcatttattagctttgcatggggggcctggtggcaatcatgaatactgggaagacgctgctgaacaattaaagaaacaaggtcttaacgttcaagtaacaatgtatgatcaattaggttcactatattctgatcaaccagatttttctgaccctgagattgcgaagaagtaccttacttacgaatatttccttgatgaagtagatgaagtacgaaaaaagcttggcttagacaatttctatcttattggtcaaagttggggtggccttttagttcaagaatacgctgttaagtatggccaacatcttaagggcgcaattatttcttcaatggttgacgaaattgatgaatatgtcgaccgggttaatgaattacgggaaaagactctttctccagaagcagttgcctttatgaaagaatgcgaagccaagaacgattacagtaatcctaagtatcaagaatacgttcaagtaatgaatgaacaatacgttgaccggaagcagccatccaagctttatcatcttaaagaccttggcggcacagcggtttacaacgtcttccaaggtgataacgaatttgtgattaccggtaagcttaaagactggcatttccgtgaccaattgaagaatattaaggtgccaactttaattacatttggtgaacacgaaacgatgccaatcgaaactgctaagacaatgaatagtctcattccaaattcacagttagttactactcccgatggtggtcaccaccacatggtagataaccccgatgtttattacaagcacctcgctgacttcattcggaatgttgaaaataatacgtttaataattaataaaaagaccgaggaaacgtttctcggtctttttattaattattcatgaatcatattttaaaaatatcttaactagaactaaaatattaaatgaatatggtacgatatttatacgataaatacgaaggaatgattaaagcaaaaacttaatacggcttcactgatgttgttcgcttaaggtgtgggacctttaagcattagttactttactcaatttatatatttaaggggaaaaatgaaagaaaattatcaactaacaactgacgaaataaagaaagaataccaattaactgattttactcacggcctatcaacccaagctgtcgaaaaacggcttgccgatgaaggacgtaatatcattgaagtaaaaccaacacccaagtggaaactattcttacgccagtttaacaatattgttatctacattttattagccgctactttactgaccgttttaattggtcactatactgatgcgattgttatcggggcggttgtcattctaaacgcgctcattggttatttccaagaatcaagcgcagcgaatgccctcgccaaaattaaagagatgatggcgcaacatgccaccgtctaccgggatggtaaacgacaagatattgatgccgcggatcttgtccgtggggatgttgttttcctcgaagccggtgataatgtaccagctgatttacggattgtctcagctgataacttacgaattgaagaatcggctttaaccggtgaaactaattcggttatcaaaactgatgaagcaattaccgaccaagacgttcctctcgctgatcgtgttgatatggcatatgcttcgacttcagttacaagcggaagtggcctaggagttgtagtcgcaactggtgaacaaaccgaaattggtaagatttcacaagaagttgcgcaaatcaaatcaaagaagaccccattaactaaagaaattgaccatgttggaaaggtcgtttcttacattacaattactgcttcagtgattgttttcgttgtcggtttcttcctcgaaatttactccttgcctgcccttgcgcttgcagtcgtggcaatgttggttggtgcgatcccagaaggtttgcctgcaattacctctgttatcttagcctttggtattagcaaaatggccaaagagcatcagacaattatcaaatcaatgcctgctgttgaaacattaggctcggtcgatgttattgctactgataaaacaggaactcttaccaaaaacgaaatgaccgccattgagttatgggtcggcgataaacactacacggttaccggaactggttatgctcctaatggtgagattctcttaaatggcaaaccagctcaactgacagatcagctcaaacttttcttagaggctggataccaagcaaatgatacggctttaactgatgaagacggcacctggcatattaatggtgaaccaactgatggagccttcttaactctttatcacaaagcgtttggggctaaatatcaatcgccatataaagctgttgacctccttccatttgattctgattaccgttacatcgctgaattaactcgtgatccagaagataaacaacaagtaatctttgttaaaggatctccagacaagctctttgaaatggccgcaaaggaagatccacaatttgatactgccaagtggcaacaacgggtagatgactggtccaaagccggaaaacgagttattgcggttggctatcaacctgttaatggcaaaaatctaatagaagtcgaacatgaccacctctacaggggaattcacttacttggcttagctgctcttcaagacgcaccacgcgaagaagtgattgttgcgttaaagcaaatgaaccgtgctggtgtttccattaaaatgattacgggggatgacccgcaaaccgcccgtgcaatcggtaagcaactaggcttatcgacgggcccgatcaacgcaatcacaggtgcagaatgggataaactttctgccagtgaacgagaagaggccgctttagataaccaagtctttgcgcggacgactccacaaaacaagcttgaaattattgaagcgctccaaaatcggcaaaagatcaccgcgatggttggggatggagttaacgatgcacccgccttaaagaaagccgatattgggatttcaatggggatcaagggaacggacgtcgctaaagatgctgctgacatgatcttaggaaatgataactttgcggtaatggctgctgttatcaaagaaggtcggcgaatttacgacaatatcaaaaagagtatcttattcttattaccaacctcctttgctgaaggattggtggttgccttctccattcttactggtcagcaagttcccctccaaccagctcagctattgtggattaacttaatcgccgcaatcactatccagtttgcgttcgtctttgaaaaagcagaaaagggcatcatggatcgcaatccgcgccctgtgacccaacgattaatgaatcgacatgatttaatccagatgggttatgtctcagccttaatggcgctgttcgccttaattggttacgaatggttcatcagtgctggggcagacgttgtcaacgctacaacaatgatggttaataccattgttattagtaaggccttctacttcttcagcattcgaactgaacgatatggactaaaagaagttggaaatattggcaagaaagcctggggcgttattggattgatgattcttttccaattgatcttcacctacgttccatttatgcaggctgccttccacgtgaccggaataagtttactggaatggctagcagtaattgtcttctcttgcttaatcttcttatgtactgaatctgataaaatgattcgtttccgtctaaatcgacggtaaaattaacgccactgaatgagatttttcatcttcttcagtggcattttttaattcataagctttcgtaatgttttgaccaaatctatgtaagcgtattccaaaatctgatataatatacctaacacatagaaaaggagtcttatcatgaaatatcaagaaaccaaagaaacacttaatcaattagttgctgatctgagtcaaatggcaatgataattcatcaaactcactggtatatgcgtggcactaactttctaaagcttcacccattaatggaccaatttatggatgaaatcaacgatcaacttgatgtaatatctgaacgattattaactctcgacggtgaaccttattcgacccttaaagaagtcgcaacccatacgaaaattaaagactggccaggaaactttgataaaacaacgccagaacggcttgcgcatttagtcgctggttatcgttatcttgaggacctttatcagcatggaattgaagtgactgacattgaaaaagattattctacccaagatatcttcattggatttaagacggcaattgaaaagaaaatctggatgctgcaagcagaattagatcaggcaccagaaattgacaactaataatgaaatcggcaccaaactaatcgagattcgaacgtttggtgccgatttattgtctaaaaattattttttctgattatctaggagtccttctttttcatcttttaatcgcaagtcatcaagccattctacatgcttttcttcataactacgatctttcttgataaagaagtatgctaccgcggcaagaatggcgatgacagttccgacaagcaaggtcttagccgtaaaattagtaaccatgtaacaagaaactaacaatgcaaaaatggggataagatatttcctgggtaatttgaaaccatgtgttggatattcgttactatgttcaaatttaatgacggcaagaattgagggaacatattgaatgaatgaagctaagactgtacaactaaccaagaagagataactctgggtagcgaataaagcagaaaggatggatgttaataaaattccgactcatggggcatcattcttattcttcttcccaataaactttggcaacatgccgtgctcattggccattgaagtaattaacgatggcgtgttaaacgaagatgaaaaggcaaccccaaagatacttacaagcatcccgaaaataataaaggcatatccccacttaccaatagtggttccgagtcctttcgcaagggcacctcccaaagcattagccagtggtgtcgagtagccgcctaatttagtcccggaaagtccaacggcaacggtcatcatcaatgcatccaaaatagttacactaaccatgactgcaattaacacccgaggaatattcttttctggattcttcatttgcttagcagcaattggtaaaaatgaaaaaccagtaaaaagataaaagatcggggtaaaggcttcaccaaaatgatgaataaatgacattggtccctttaaagctgcttggggaatcactggtgagaagttagctttatggatgaagaagaccccaacgacaataaagatgatcagcgtaaggatcttcgcagccgctgatacattattaaccagtttaacaaggccgtggccgaagaaattaataactgcaaagagcacaattaagccaaaagcagcggctccatagataagcggccgattaaagattggcaaaaagttcttgagggtagttaataaggcaacaatttccgctgaatgggtacagcagcctaagaaccaggtaaaaatccctaactcataaccggtaaatcggccaaatgcatgataagaataaagccatgctgcacctgagccggtaaaacgactagaaagatcggcataacatagggcgatcaatgaaacggttattgctgtacatagcaaaactgctacagccgataagttcatgtaccgataaataacagatggcagtaaaaatgttcctgaaccaattactccattaattcctaaaaagtaaatcgaaatgaatgatagctttttaggtactgatttttgattactgataatgaccaccccacataaaatttataattccatttatattgtagtcttttcaaataaaaaggtaatttatcagctattctaatctcaatcttttctgaaattgttatacaattaagaacgtacttatattttataaaggatgaataaaatggcacagaagattgagaattttatttttgatattgacggcactttaattgatactattgatatgtatatgccagcaatgattgatgttttagctcaacatggtcacccagttgcacccgacaaagtagagcaaactaagcatgacttatttggtattacgggacaagatgccctccgtcttgctggaattagtgaggatgaaattccggcgatccaacaagactggtttaagctggcttatcaacgtgctgatcaagtaaaagtgattgaaggaattccggaaatgcttaatacccttgccaatcgtgaagatgcaaggatcgccatcgcaacttcaaaactcgctgacgaataccaagaatacttcgttaacaaatatgactttgcaaagttatttaaggttgccattacgtctgctgatactaaaaagcataagccagctccagatcctattttagcggcaatggataaaatgggagcagatcccgccactactgtttatgttggagacacgatcaatgatatgaaagccgcccatgcagctggtgccaagtttgcaggcgccctttactcttctgcaaatcccgatagtattaaagatgcggacttcccattaatgaagcccgctgatctcttagaaatttaaaacaaataaggagtctctggtgtttagaattcaaacgttagagacttcttttaattgttattcatgtccaccttaagaattttattaataatactactttggagtctttacatgctctgcaacatattcttgagccgttttttctggcatttggtaaacattaacgagagcgaccactatttctgacggtgcagtcttttgactggctaaaaacttaactaatttttgtttcgactcttctctttcttctcgccgtgcgtccattaaatcaagctcgaacttcataaagcctcgtctcctctctggctcctgcttaatcttaataatctcgtcttgaatcttaataataaacttactcttattgtctactcgactacgcattaaagcaaggaagttcttaatcggctgctcatctttagtaaattctttagccaaggcattaaagatcacaactgtccgttggtcgcctaatttcaactgatgattacaagtacacgccatttcaaacacataacgggcccaaccatagccaaaataatcaaaatcacaaaacatgagcacataggtcggatgaagacttaaatcgcgataatccttgcccggcaagagtaatccatgatctatttgctcttgacaataccgcaagcgataaggcaaattctgtcggtcagctacctgcatctcaataacaataatgttgccatcttcatcctacacataaacatcataacggacgcgccggccagctacgacattaatatccttttgagttgttaactggacgatttgagttgcctttaaatggggtaatgcacgattaatcaattctaaacaaatttctttattctgcataaccatcccgaacattggatcactcgtaatagtcatcttttcccacttttcgagggccttttcatagttctctggcaatttcttacacatttcctcaatcctttcacttctacctcactataaagatatatacgtaaaaaattgccttttgcactaaaaatccctaagtcagtattgctaccaacttagggacttcaactatccaactgaaatatacattaattgccggccttcgtaatctacggattatcctcgccagctatctcttcattcagcagaatagccagtcagcaaatcattctgttacacaagaaataattattcattaagaaaagacttaagattaagctctcataacttaatcttaagtctttttaatagtcgtcaattatagttatcaatcaaaattaacgtctgaattttgatgaattttacttgtttattgcctttgaccacacaagagtccctttctcgttggtaaatcttatcatgtctaccaggattcatagaaatcgtcttggcaccatctcttataattaccctttggggaccatttactattgcatccctttttctaacttgaactactcccacttagctaaacctacggtttaattgcttgaagtgggagattctggaaacatcgcatacttaccctaccgattctgaacgaaccttcaagcagaggttacgactattagccaaggctcgtcccgagcctaactttatctatcggatagctaatcctttttgcaagatgacttgtgcagcgttaatatcacgatctaaatgtttaccacagtttggacaatcccactcacgtaccgctaaccattccgatttattcaatcctaaccgatgattattcttcccacaattagcacaaatttggctagtatatgacggattgacctgaataagctttttaccgtaccagtcacacttatattgcaacatatctactaattttgaccagctagcgttagcgattgctctagctaaatggtgattcttcatcattcccttagtattaagtttttccaacacaatgatgtcgtactttttgaccaatttagtagtgaatttttgtagctgatccaaccgttggttggcaatcttttgtcgatacttcgccaccataatacgagctttctgataattcttaaaatcatctaattgccgtggaactaacactttattatgatgatcccaggcgatttcctgctgagcctttaagaaccgacgactacgcaatttctcccaacgatacaactttttatggtatttgtcttcaaaatgattgatcggttccttgcatccatctgaaagattaagtaatgacttaagtcctaaatcgccaccaatatatttacttgttttaggaagagtttggttttcgctttccactaaaacagtaatgtaatattgaccagcaacgttcagacgaacagtgacattcttaattttacccattggcaatcgaccagctctaaaatagacgataccgagttttggtaactttatatgatggcaatctaaaactttaatattgccattaacgtactttgaattgtagctctgagaatattttctggatttaaatcgagggaacttattttgacctttaaaaaagcgttgaaaagcatcggctaaattgcgattagcactttgcaaagcagttgattctgcttgtttcaaccaaggatactcaaccttaagttgtttcaacagattattcatcccaaaggcattcacaaatttagcttccggattattcttgcgccgttcaatttgcatattaagcatttgattccatacaaaacgaacacaaccgaaggtttgccagagctgatttcgttgtgctgaatttggatagatgcgcattttaacggcttttagaaccattattttctcccttgactttcaatatatcgttttacaacttctaaaggcgctccaccagtgctaattaagcaatagctttgtgtccaaaaggctgatttccaaagatattgcttgatttctggaaattgttttttgaccattctggagctagacgatttgtaagcatttaaaaatttagccatttccgtatgaggcgttgttctaaacaaaacatgtacgtggtcctgatcatgattccattcttgcaaattaatgccgtatgcttgtcccacaactacaaaacgatgtttaagatattcagatatttcatcgttaattacttttcgacgatacttaaccaccattaccaaatggtaattaagtaagtatactgaatgctgatttctatctaattctattgttatcaccacattttatagatatatactaaatatatcatagaacaaaagaaaaagcactaacgcgctttaagagagcgattcatcccctacttatagaagtaggggtattctcgcaaatttatggataaagcgagtaatgtttgttttgacgatataattttttggctttctttaagcttactactttaagtggtcgggctccctacgcgtctcttccgatatatgcaatactgaaatgttggcgcaataaagtgtttgtagcgttaaaaatataataataattatagagcacttttttatctttatcgaagtatctaaattctagtgcttcagtcttatttggagtcaatgaattactggcgtttttggttcctaaataagtaaataaagcaattgaaaggccaaaagcgatgagggcgatatacccccaccgcttattatttttttctgggtgtaattttgcgtgaaactagccgatgattaccttgacttagcttcgtatgacatactgaacattctcgtgaccctaatgcattaacttttccacaattaggacagactaaggcaagcatctgtcctttaagggatttcccacaattctcacagacttcggcatcgtctggatttaatgtattacagtagggacattttttcatttagtaatccccattgaagagctgtgcattgccattcgcttatcgggatagagtttcttagctagggcggttaccgctgtcggtgcttcaccaaagccggccgcaatcaatgcgactttccccgggtaggtcacaccatccccgatcgcatataccccttcaacactggtctccatcattgaatcgactttgatcaagttgcgctctgctgctaagtcaagggaccactgatttaaggccgcattgttagaagtaaagccatagttaaccacaatcttatccacattcaattgtgcttcgtcgtcactacgcatcttcttaagatcaagcgttaccgtttcatcgtcttccaccgttaatgcgcgtggtaagaaaggcgtatctagttgtacagatgactgtttaagctgagttacagtatgctccagaccgcggaactggtcccgccgatggacaaggtggacttccttagcaacgggttcaagcatcaaggcaatatcaatcgcggagtcgcccccaccaagaatggcaacccgcttgtccgcataatcagctttatgattaacaaaatatgaaagctgcttgccttcaatctcagctgctccctctaaagcaagcttacgcggagtaaacgccccgttaccaagagcaatgattactgctcgtgaccgggatacccgctttgctgatttgatggtaaaggttccatcgtcttttttaatgacgtcctcaacagtttcaccgaggaattggtcgatcggtgccactgccatttgctcttctagcttagcaattaggtcatgtccagttacacctggcattcccgctacatcccaaacttgtttttcaggatagagtgcccctacttgtccgccaagttgtggaaggctttcaattagctgggcatctaattcatgaaggccgcaataaaatgaagcaaacatccccgctggacctccaccaataattgtcacatcgtaaattttctctgccatttctcctctgatcctttcattttcatctctagaagtattatatcatctttatttttctaaaatttagtaagcggtctcaaattttaattgtaattattcaaaatttaaattaacatattatatacagagattgattttgcttaaaattggaggaataaatactatggcaaaacgtaaaatgattcttgatttagatactggtgttgatgacgctttagctattgcctatgcgctcgctgacccagaagttgatctaatcggaattgtaagttcatatggtaacaacctattagatgtttgtgccgaaaacagccttaagttattggaattattaggtcacactgatattccagtatttaagggtcttccacattcatgcactactgaacactttgatgtaatgcaagtttcaaaggatatccacggtgataacggtatcggtgatgttgaattacctgcgccaagtcgggctcttgaagaacaatccggtgttgatttctacatcgaagccgctcacaagtatggcaaggacttaatcatcatccctactggtccaatgactaacttagctgctgctttgaagaaggatcctgaaattgctgacttgattggtaatgtcacattcatgggtggtgccttaactgttgaaggtaatgttactcctgtcgcagaagctaacattaaccaagacccaaaggctgccgatgaagtaatgaagtccaatttgccacttacgatggttggtcttgatgttactcttcgtactcttcttactaagaacgaaacaaagcaatggcgtgaattaggcactgcttccggtaaggcttttgctgatattaccgacttctacatcgacgcttactacaaccttgatattgataagcgtggttgtgccctccacgatccattagctgttggtgttggtattgacccatcatttgtttcaactattagcttattcatgaaggttgtttaccaagaaggaccttactatggtcggacaatcggtgacaacgctaagttaaacgatcctaaccctaatgttaaggttgccgttaacgttgacaaagaacgttacctcaaggccttcatggaccacctaaacaagcttttcaaagaaaattaaagtaagtgggaattaacctcctcgacaaggcggtgggctaaggatagaacggtgattagcacggcacaggctgattatcgttcggacttagacttgagtcttgtggttaatttccacgatatcttaacaaatattcgcattaagaggctgttgaaaataattctccagtctcttttcattttacaaggcgttattctcctgtttttcttcgatagttgttatattgaactactcccacttagctaaacctacggtttaatgcttgaagtgggagattctggaaacatcgcatacttaccctaccgattctgaacgaaccttcaagcagaggttacgactattagccaaggctcgtcccgagcctaactttatctatcggatagctaatcctttttgcaagatgacttgtgcagcgttaatatcacgatctaaatgtttaccacagtttggacaatcccactcacgtaccgctaaccattccgatttattcaatcctaaccgatgattattcttcccacaattagcacaaatttggctagtatatgacggattgacctgaataagctttttaccgtaccagtcacacttatattgcaacatatctactaattttgaccagctagcgttagcgattgctctagctaaatggtgattcttcatcattcccttagtattaagtttttccaacacaatgatgtcgtactttttgaccaatttagtagtgaatttttgtagctgatccaaccgttggttggcaatcttttgtcgatacttcgccaccataatacgagctttctgataattcttaaaatcatctaattgtcgtggaactaacactttattatgatgatcccaggcgatttcctgctgagcctttaagaaccgacgactacgtaatttctcccaacgatacaactttttatggtatttgtcttcaaaatgattgatcggttccttgcatccatctgaaagattaagtaatgacttaagtcctaaatcgccaccaatatatttacttgttttaggaagagtttggttttcgctttccactaaaacaataatgtaatattgaccagcaacgttcagacgaacagtgacattcttaattttacccattggcaatcgaccagctctaaaatagacgataccgagttttggtaactttatatgatggcaatctaaaactttaatattgccattaacgtactttgaattgtagctctgagaatattttttggatttaaattgagggaatttattttgacctttaaaaaagcgttgaaaagcatcggctaaattgcgattagcactttgcaaagcagttgattctgcttgtttcaaccaaggatactcaaccttaagttgtttcaacagattattcatcccaaaggcattcacaaatttagcttccggattattcttgcgccgttcaatttgcatattaagcatttgattccatacaaaacgaacacaaccgaaggtttgccagagctgatttcgttgtgctgaatttggatagatgcgcattttaacggcttttagaaccattattttctcccttgactttcaatatatcgttttacaacttctaaaggcgctccaccagtgctaattaagcaatagctttgtgtccaaaaggctgatttccaaagatattgcttgatttctggaaattgttttttgaccattctggagctagacgatttgtaagcatttaaaaatttagccatttccgtatgaggcgttgctctaaacaaaacatgtacgtggtcctgatcataattccattcttgcaaattaatgccgtatgcttgtcccacaactacaaaacgatgtttaagatattcagatatttcatcgttaattacttttcgacgatacttaaccaccattaccaaatggtaattaagcaagtatactgaatgctgatttctatctaattctattgttatcaccacattttatagatatatactaaatatatcatagaacaaaagaaaaagcactaacgtgctttaagagagcgattcatcccctacttatagaagtggggtattctcgcaaatttatggataaaatttgtataagattgttttgattttactaaggaagtgtcttatcaatgggtcgtttagataataaagttgcaattgttactggtggttctaaaggaattggagctgctgtcgcaaaaaagtttattgaagaaggcgcaaaggttgtttaaccgctcggaagatggatgaaggacaaaaagtcgctgaccaattaggtgacaatgcgatctttatccaacaagacgttgctcggaaaggagactgggaccgagtaattcgtcaaactgtccaagtcttcgggaagctcaatattgtggttaacaacgcggtaattgccgaatacgccgatgttgaaaagacacctgctgaaatttgggataaaacaattgctgttaacctcaccggtacaatgtgggacactaagcttggtattgaagcaatgaagaacaacggggaaaagaatttgatcatcaatatgtcatccattgaaggactaattggggatcctgatctctttgcctacaatgcttctaagggtggtgtccgcctcttaactaaatccgctgcgcttgattgtgcccgaaaaggctatgacatccgtgtaaatacaattcatcctggttatatctcaactccactagttgataatttggttaaggatgatccaaaagcagaaggacacctagaaagccttcatccccttggccgtcttggaaagccagaagagattgctaacctcgctttataccttgcctcagatgaatcaagctttagtactggtttggaatttgtcgctgatggtggctatacggctcaataatattcataaagggagcgatcgtgacttcgtttttcgacgcgaagctagcctctgggagcccctgcaagcaacaataggcctccaacgttcggttttaccggacgttggaggccattggtgtactgcgccatttgtcttttatgaaaataacttggcttatgtcacaatccttttgtttcacattaaattccgaattaccaatgaaattgccaaaatcaatgatccaatcccgacaattatttgcataagacggccaggcaggtggcgaacaataatcggtcctaagtaacccccgattacatttccaatcatcaacggaataacataattccaataaattgtcgtctcaagggcgaacactatccaggatgttgtatttgtaacagtcatcgcaacattttttagcgcattattaactgcaaagctcttttgccgattgatcactgtcagcaaggttagcattaacactccggcacccgcattaaagaagccggaataaatcccaacaataaaaataccaatgattgataaaaattggccgatccgtgacttaccaaataatttactgtttcctgccatcgtccctgtactttgcttcggatgatggggaaacaacaagataattccggctaacgcaatgcataatggcaccagttccgcaaaccacttactggggacagcaaatagcaaaaaagccccaataatggaaccagcaaataccaatggcaaaataatccataattgtcgccgattatgctctaattccttaaacgatgaaaagaccgaactatagttaccagtgactgtcgaaaaagcactcgttacgtttgccatcactggcggtaaccccaatgcaagcagtgaaggataggagactagtgatgctaaaccagcggctgcactaataatccccgaaagaattccaattcccagtaataataaaacaaaaactactccactcatttttgaaccatccctttaaatgctagtactaattgtaaaccacttttctaagataagtaacctaattaacgatttgcattctgttataatattagctatgataatagagaataaatctggggtgccaaacggctgagataatacccattgaacctgctctggttaataccagcgaagggagattcagtgatattaacttaatgattaactccatgattttttgtcatggagtttttttgcccttatatcttaaggagttttattatgactaaacgttcattacatttgcgtgacattattttgcttgccctgattggaattatttttggtgtaatttattttgcagccagctttgtctataacgggctaactgttctactgacaccaattggttatggtccaatggctaacgatttaacaatgggaatctggtgtatggctggaccgcttgccggctttttgcttcggacaccgggagcggctttccttggtgagtttttgggagcagccgttgaaatgcttctcggcgatcagtggggagcagccaacctaatttctggagcggttcaaggtatcgggtctgagctaggttttacttttacgttctataaaatgtataactggttaaccctcctcatctcatccctcacccttacatttgttacctttggctgggattggttccgcaatggctataaccacttcagcggacaaatgctaatcattatgctcatcgcccgtttcatttcaatgtttgtcttctctggaattctggttaaattgattactaaccttctccaacgagcccacttaattaaacactaagactatgaaaaatatacaatttaatgatctttcatttaattttgatcagcaaccgattcttaaaaatatcaccgccaaattcactgttggaaagattcacttacttaccggggtttctgggagcggtaaatccaccattctcaagttaatcgctggtctcctgcctaaatatggtggtgaaatagttgctggagcagtcgatgtaccaacagatgcccatatcgggatggtattccaagatccgttaatgcagtttgctcttgatacgccacgccacgaattagaattcactctggaaaattgccaagtcccaactgacaaaattccagaacgcgttaaagaagctttacaattcggtaaagttgacgaccttgctaaccggttaatcaccacgctttccggtggacaacaacagcgcgtggctttagcagcagctacggcaatgcaaccgaacgtgcttttattagacgaaccctttgccaatattgacgaagaaaaccggcaacttatccttaaacaattagtccgcctcaacagtgactatcacacaacaattatcattactgaccatgatttgcatggttacgagcgactacatccattggtttggcaattaactaaggggcaccttgctcaactttccagtaaaaatagtagccaacttttaacagcgagcgcgactccccaaattaccactacccttcctccgtcaaccttgcccacgattatcaaatttgatgaattagcaataaaacgagagaattattccttacttttaccaaccaatttaggcattgttaaaaataaaataactttattaaccggaccaaatgggattggtaaatctacccttctaaaggcaattgcccgacttttgaaatatgaaggaaagattgactatgcggaggaaaacattcaaaaaatatcacctgggaaatattacaagcatctgggattgattttccaacatgccaacgatcaattcctaaatgtaaccgttggcgaagaactggcattaggctttaaaacttgccagaacccctattttaatcaacaacaagtcaacgaagcattagcagctcttggtctgaacggaagagaagatcaagttgtttattctttgagtggtggtcaaaagaaaaagctgcaaatccttctgatgttaatgcgcggacaagaaaccttattgcttgacgaaccatttactggtttagatccaacatctttaaagactgtcctgcaactaatcaaagcatcccaaaaagaaaaaccacaaactttgttgattgttagtcatcaattaagcggacttgatggtttcattgattatcatcttacaatgaatcatcaacgtcttaattatgttggagggagttatgaatcctagtttaaaattattacttgttattttgctttcacttgagctgacttttgtaactaagctgtggattaatctgattgtcattgtaatgtgtttgctaatccttattcatcagcgatttcactggcgacaattttgctggttggcttttgtccccctctttccggcactagctatttttattacaattgtcttcttcagtcctagtcacagtttctttgatggaactgttctttttagtcgactttacgtttatgtctgccttggaacggtctttacatttacaaccgataccttaacgcttgctcgctcattagaacaaaattgtcaccttcctagcaaatacgcttatggggtgctcgccgctcttaatctgattccgaaaatgaaacaagccgttacaactatttatacgaccggacaaatgcgggtgttaatttacattggtggtcaccaacgctctacttcaaagcgattctggttgctattcaatggtcggatcaattagcgcaagccatggaatcacgcggtttcgtagaaggacaagcacgaacagctaccgtgaatatcccgattaccagccacgattggctttcttttttaagtattatttgccttgtacagataattgtaattgcgctcccttgagttttcatgcgataataatataaaagaagggactgatatagtgaacgataataatttaacggaccggatcgttaatgctttatcctatttaagcatcttatttttaccagttatctttccactaatcgtgtggataattgcaaaaagcagtgatcgaccaactattgctaaaaacgctcgctatgcattttggagtcaaattttcccattgttatatgtaataggcgcaattttagtctttagtgtcttttcattaacccccgctaacttccacgggggcgcattgtttggaattctcctaacatttgctcttttattagcccttttgttatttatttatatatttgccatggccgtgaaaatgctgattggccgtgagtaagctaagagagtagtaagtgggaattaacctcctcgacaaggcggtgggctaaggatagaacggtgattagcacggcacgggctgattatcgttcggacttagcctcgagccttgtggttacgacgcgaagctagttccacgatatcttaacaatgttcgtataaataaagaggctgttgaaaaaaataaatttttccagcctcattttttatccaaaatatcaagtgaggtgattaatcgatggaaatgattttaggcattgttcttctattgactgctgttgttgcagctaatgttgttcatcttgtttaccctaagattccactatccatctatcaaattattgcaggaattcttttagcatccctgcctactgaggccactaactttaccatgcatccagaattattcatgatggtgatcattgctcctttaatgtttaatgacgggcagaaccaatcattccgttatctttcaagcaatattaaatcgatcctatcaatgactgttggattagcacttgtaacggttttgattactggtagttttttacattggcttcaaccaggaacgttctccttagcactcgcctttatgttggctgcgattgttacgccgactgatgcggtcgctgtaaagtcaattactactaatatgaaagtaccgaaaaacgttaatggtgctctggaatatgaatccctctttaatgatgcatcgggaattgtgcttttagatttggcgctggaaacctaccgttctggacaattttcgcttggtcatggaatctggatctttgtttatgttttctttggcggaattatcttcggagcagtgttagggagtctgttaattagtctccgtactagtttgatgcgaaaacatgttgatattggctccatcgttattccgatcaacgtaatgactcccatcgttgtttactggttagctgaagaactacacctttcaggaatcctagccgtcgttgcagcaggagttgttcatagtatcctctatgatcgaatgcggcttacatctactaaagtgcaaatgtctactaccactatttggaacatcattagcgatgcgttaaacgggttagtatttgttcttttaggggtgatgcttccgccggtacttggaaggacttcttggcaaaatctgggtgcaatcgttgccttagcctttgctatctatattattacaacccttttaagattcttatgggtccggtttaagctcgtcaacattcaatcgactaacctcaaccgtgatagtctcttaatggcgttaggaggaattcacggaacaatcactctggcattggctttctcgctgccagttctgattaacaaccatcaatttgcgttccgtaattcaatgatattgattgccgcaattgttattttgattagtattgctgttggcgcaattgggtatccaattattttaccgcctaaatctaagagttattcgaagagtgaatttcaaaaagaacttattaaaacagttcaatatgctattaatgagctacggacttcagaaaaatattccccagaaaaagccgttgttattgaccaattgagtagtcaaatgacgcaataccacgaatttaatcgtaatgtttatagtcaattaatgggtaaagctcatcaaattgaattagctaccttagaccgacttaacgaagaaggccgaatctctgacaaggaggccaaattcctcgttaattttgttacgcggtcgattttccgcgtaaataaacacagctttcttgaattatgggtcatcttatggcaccggttaaaatggcgctttattcgctaccgccatctcaaaaaaggctcccgctataatgtggggccaaaatatcaattaaccaaggaacagcgcgctgaaacagctgagatcctagaaataattaatcgtgaaatcgataaataccttcatttgattgaaactccacaaaatgcgaatgaagttgccatggtacgacggacgtacttccaacgaaaacgattcttcctccacgatatttcgatggataccgacctcattacttctttatttattgaggcatttcagcttgaacatagttatgttcaaatgcaacttgctgatgaccaattttcacaagaattagcaaacgcattaaacgaacagatctcaactgatgaattggtttatactcaatcattagactaaaaaaggaaattgctgcaaaatcttgcaaagcaatttcctttttatgtttaaagaaatgtaagtaaaaaagcaatcaatgctggtaaaaattgaattagaataatttttttggttgcagtaagtgcaccaaataatgcaacaaccatcacaaaaaccaagagcattcgccatactaatactaaggttgccccactaaataaccagtaactggcgatgatagctgctcctaaggcgccgttataaataccctggttagcaaatgaaacccgtgcttcatgctgttgcgtaaacttaagcggtaagtcaaacgccttggcttgctgtgccgggttaccaaagatttctaaggccataatacctaaatgttcgattgcaacaaacatcgtaacaataattgcaagcatctttttcctccaactatttaatatagtgatctaaaaattttgtcaaatggcgccgatactcgctaggatgggtcgcatatgacttcgcgtgcgctgctcctggcactacccataattctttacttccctctgttgcacggtaattgcgataaaccatttcagttggaacaaaattatcttttgctccatggataaatagcattggacgatgattatgatgcagcatatttaaggagctggcttcatgaatgtaaaaaccattcttcacccgattaattaaactcatcgtacttattaatggcacccgtaaaaacttcggaatcccatataaattaccggcttcataattcaattcatcattaagactcgtatatccacaatcttcgacaaatgcttttacttgtgacggaaggttaatgccactagtcatcattgttgtcgcaccacccatgctaacaccaaataagactacctgactatcttccccattatgccgaataagtttattaatccatttacgaatatcataacgctctggccatccataaccaatgtatttcccttggctttgaccatgagcacgcgcatccggcattagaacattataccccatctgatggaaaagcgcggcatattcgcccatcttctctttgtcacccataaatccatgggcaattaccacatttttagttgtcggtttagcagcagggatgtaatcagcaactagtttataatttccacttgccgatttaattgtccatttttcttttttggcatgcttaaaccacattttctgctcatacaatggatcatttcgtgaaattttagttgaattattaataaaatccttatgccccggtaccattgccaccgagaaaaaatagctactagcggcaaagattgccactgcgattacaactacaattccaatgagccatcgccaaggatgccactgtttcttttttgtctttgttttcaaaataattaaccccatgtcgtatcatttaatcaatgcgcctagtttagcacactttctgttattttgcatattcttttcattcaaaattgttatgctaatgttaaaatagataatgatatattaagggagtgaaataatgtttccagaacgcctacgagcacttcgcaaaggacaaaagataaccttaaaggagcttgctacccatctcaatgaaaaccttggccccaatgaaaagccaaacactgcttcgcaaatcggtaactgggaacgcggtattcggaccccgtcatacgttgaagcacgaaaactagccgaattctttgatgtcagtctggactatcttaccggaaaaactgatcgtgatgattttgatttagcaaaattatttttctcaagtaagaacctgtcgtttaatcaaactgtactttcaagtgatgatcgatatgaaatttttcaactaatcgatggttacttaaagggacggcataatcgccgggatacagacaccttctatggtaagcaagaacaactagatttaaaacttaaataaggagtttctgatgaatcctaaaaaattaaaacagctaaaaaagcgggtaaaaaaagctcatcaaattgttaatgagccttcatatattcaagaactaaatacttaccgtgacctattcgatgactttcctcctgtaaaatacctcattaataatgttttagaaagtgatcgactactcaaaaacggcttattgccacaacctctaccaaaattattattgccggataacattcaagataccattttcaaaaaggttaatgaacagttcccacaaggtgatccacgtggcgataaactttggaataaatatagtgaggcgttgccaaaattagataaggcgttgcgcaactatcgtgattatctcgaggaaacatacggaatgtggtcatacgtcaatgcaccttttgccaaagcactttctgattatttaggtggggcaccgacattagagattatggccggtaatggttatatttctaagggattacgcaataacaatgccacccaaaggatttatactaccgatagtcaggcatggataaaagaaaacgaaacgggcaaacaccctgtcactaagattgagaagttggacgctctagaagcaatcaaaaagtatggtgacgaggtcgaatatgtcattatgtcatgggctcccgataagggtgaaattgactgggaggtcctgaaacttcttcgttcaacattccctgaagtcaaattattagttattggcgaaaaagatggcgcaactaactctaagaaattctggcaagaagcccaattgagtcaagacgatgagttacagaaagttaatgctaacttgcactcgtttgatttgattgatgaacagatttatctagcaaaataaaaaagttgaggttaaaagagaacaaaagttttctcttaacctcaactttttatttaatcaattttagccactaattttccaactacttcatgatttttaatcgctgttaagcccttaataatttgatcaaacggaatcactttctcaatcaaaggctttacatccccattagctattaattttaacatttccgcattcattcggcccaaatcagcttgctgatttgggttgccactgagatgcgccccaccaagattaacgacatctatccctagaccgcgatcaaacattggaacattatcaagtgaaggaacgtcaacaatcgttactaagcgtccattataggctaaccgccacaaatcaagttctgcttcttttttacctaccgtatcaatgatcaaatcaatgccaagcccatcggtgagatcggctaactttttatccacatcttcagtttgatagttgatgattgtatctggagcaagctgctttacatagtcatatttactagatgaaacagttgtaaataccttacaaccatgaagtttagcaagttggatagcgatactgccaagcactaacgccgccttcaacaattttatagtcgaccggattaagcccagcagcatgcaccttaattagaacttcatgttcagccggcgtaggaactggggcttccgcaaaattcaaatcttgcaatgaacgatctgctgctttttcgactactaaggctttcattttttcgctctccttaattttataataattattataacactttgcctaggcattcttcatagccatcttattaaggtagtgccaaatttgcgaacgatatttccgtaatccgaataacatcacaagataaatgataattgctagtgaaatccaaacaggactttctgatataaaggcagcaaaaaccaatgcattcaatggtcgcgccactaaattaaaacttgttaccaggactaccccggttggaattgcaacgccatagtgggccactgctgcagtatagaccggactgagccaactggccgcatataagcctaaactaaaccacacaattcccgtcgcaattacttttaagatatttccacgagtcaccgcgacaattgattcaatcatgtacggaattgcaattaaatcaactaccggaagggtcttattgccaggaagaataaaagcaattaaaaccataatcgggattaaaatgattcctgaaattaaagtggctgattctccatagccaacgccatcatcaacagctaggaaccaccgctttttatcataacggctatttttattttcgccatgtcgttttttctgctgctcatcaatttcattcgcaatgggaataaatgcctttgcgaatacgtttgtaacaaggggaaagatcgccataacggcagctaattgaatcgcaaatttagtaatctgtccccaagcgcttattttccccagtgaagataaattacccaagatcccaattattaatcccaggataattcccattgtaattggttccccaaagacacctagttttttctgaaaatctttaggagtcattttcactttgttaaatcccagtaaattccataacggatctaaaataatcgctggaaccacttgctcgatattatgtaaggagtcgacagtggtattctcaattccataatagtctgcccaccgatctgcttgaatttccgctaagactagtgagtacaggagcataaaaaattccagccctaatgatagccaataattatgagttacataaaaagctagcgtgccccaaatcatatacccaaaattattccaaatattagaaggcagaaatactttggtaacgccaagcgcaaataaaattaattcagttagtaatccaaaaacaaaaaacgataaaccaaccgttgatccaaacgctgctaatgaccctgcttgccagccgatatcaaccactggtagtttaatccccgtattatcaaccatttggcggacaatcttagtcaccactggcgtaaattctgtgataatccaggtaaaaccagttaaaccgacaccagcatagaaagcactcatcattgctgtcttaggctgcactcgtagtaataaagcaatgataaaaattattattgggacaactacactcgcgccaaaagtttgaaaaatagcattaacttcttgaagcatgttttactccctccatcgaataaactgttacctatattttccctaagactggtctttttagcaaggcaaaaggtttatctgcgtttgctatagaaatctattcagaaatttgctacagtatgatgagtttaatctattagggagggtacattttatgaaatatcgtttacaagctattatttttgtcttcgttgcctttatgctcgggtgtaacgaatatatgattgtcggcgttttacctgatatcgctcacgaataccatgattcgcttggtaagttaggcctacttgtaactgtatttgccttggtttatgctattttcactccgattattacttcaatggcaaatcggtggcgacgacatcatgttttattagttctcatggtcatcttctttatcggcaatacgtggacagcaatggcgccaaactttatttcaatattgctttcgcggatcctaactgctagtgttgccggtgcgattatctcaatggtcctcgtaatggcgagctatgttgcgccgcgtgaaaaaagagcaagcctggtttcatgggtttttgctggatttagtatcgcttcagttatcggcattccaatcgggaccgttatcagcactacccttacttggcatgacagtttttggatgatttctggaattacgatcattgtttttggcgccttgatttggctcgtcccacgtgatacgcctcaatttaagagcacccttagtaaacagtttgtgttatttaaggattcacgaattattcttggtgttagtttcattgttgctgtttgtgcggccgactacacaatttatacctatattcgtcctttaatcactaacgaaatgggctttgataacacatggttgaattggctcctattcggaatgggaatcttctttattattggtaataaatttggtggatacttggctgaccgtggcggaattcatcgtctcagtggaatctacgcggcaatgacaatcttatttctcatctttggtcctgtcttaccattccagtggggtgccattattattgtggctgtcttatgtattgccttttcatgctatggttcttccacccaattaatgttccttgatattgccgaaaaacaatatcctcaatcacttgacttagcttcatccttaaactcaatttttgctaatattggtatttcactaggctcttttactgcctctcaggctgtcaccttcactgccatgaaaaatctcggttacgttggcgcagtctatgggcttattgcaacaatactagtcatagtcctgagtaaaaaatatacgggaatgcgcaattattaatcttaactttgagtacagatttttccatctgtgcttttttatttcccgggaaattaatatgcaactaatagtagcggggtgagcaattgttgttatctaaggattctattgaccttttgattagatccaattaaattctaaatatagattttgaaagggagctttttgctatgccgtattcttttccgcatcaactgctcaaattgcggactgaaaaacaattatcacaagctgaactagctacgcgtctattcgtttcccgccaggccgtctctaaatggtaaaatggggatgctgaaccaagtatcgataagctaattttgcttgccaaggtttttaatgtttcattagaccgccttatcttgggaacaaacgactttaatcaaccagtggtaaaacttaataatattgttaaaacttttaactcaccagttctcaacagccttgatttaactattcacaataatgaacgcattgcccttcttggtagcaatggcgctggtaaaacaactttagtaaaaataattgaaggtgctttgaaacccaacaaaggtactgttaaatggtattttagtaaaaatgattctttaaatatcatgtctcaagaaaatgttttaattccaaccctaaaagttaaagagcagattatcttgacagccgccataactaaggtcggttcaaagcaacgaatcaattatcttcttgatcaattcaaattatcatcccagcaaaatacaattattgcgaaattatcaggtcgacaaaaacgtcgcctttcgctcttgcttagtgtcctccgtcagtccaagcttctgatcctagacgagccaactgttgggatggatttagaatcaattgactatttttggcattttattgaaaaggtttcgggaagtattttagttattactcatgatttcaatcaaattgataaattcttttcccgtgttctgctccttaaagatggccaaatctctcaagacatccctgttaaggaaatccaccaacataatcagacaatcgaacaacggtatcgtcaacacaatcgttaggagttttcttatgagcattatagcaattcaactaaaacaagttttgcgcaatcgtcgtttctttctttttactattctactgccaggtatttggtatgtgtttatgattcaagttgctagtacatccctccccgccactggcaacttccagctcgctttacttttgcttgctctcctgatgggaatactcggtaattcgatcgttactttcagcaaacggatttgtagtaataaggacttctatattcttcaatcgcacattagccattattctctgtgaaactatttattttcgcaattaattacccaagtcatcatcaatttgttcatcaccatcgtaattatgattcttgctattttccttcatactatcgagttcaacttcattactatcactagtattttgttaaccaatatcatcggaatatatctaagcgtgatcgggtttgcaattgggctttcctttgacgcaccaactatcgatgccgctggaaccccaatcctatttataatcgcaacttttattattccgtggaaacacctcttaccagctaattcttttattgatttctttactaatgttcaaaagctatttccaacttattatctttacgacgaccttgaccatctatcggttagtcatcttggactactatttgtaactgcgattattactctgctaccttggcttagctttatctatcgaaaattaatcaactaaaaaaccggaatacctagtactaaacatactaagtattccggctttttcgtgtattgatattatctcaagtcaatcagcactgtccacatggccgattaactagacacctcacaatccggtgagttaatgtgtcccacttgtcaaaatgtcaatggtagctcttagggtcgctaccagacctctcgactcatcgcaaattataatttagcatatttgacctatggatgcaactcttatgctcttgcttccattatatctgcaaggtgttcggctacccattcttgagttttagtaatcaaatcagttgtctttccactttgatcggtttcatttgctaattcatcgatccgcaatcccgttttattaatatcttcactctccattactaaataaagattaacagggtactcgatctctttatccaataatttaacatctaatcgctctgcctcatccatcggtatgttgattaggttggtttctaagcgaaagctaactggatcaccttttttcattttaatgttcatcttatattgaccaaggtgtcccgtatcaagttgttcaatcataaaattaattgcagttgttaatactgttttttgctgtgattgggcagcagttttttcaacttcttctgtcacaacctgatcgctcgtcaactgtgacaaataatcagctactgacatcttcattttttcatttgctccttcattttttcaattttagcttttgtatagtctgcacgctgttttgcaccataataaacaccagcagctcccactaaaattccaacaatacttagtgcttgaataaataatccgtatgcactttctcgtggacttaccatttgaaatgcggctaaactagcgattgcaaaataaagatttactaaaatcgttgcatatccacaaaagcgcatctttaaaaacgataatccgttaacaatgattgctaaaacaataaagaggagcagccgcggccatacagatgatgatgtcagcgagtgaccatgctgaacaaacataaaagcatcaaggactaatgcaattactgctgctactgatgttacaataacaactttttcattatttttcatttattttgccaactttcttttttgctatccccgcggatgaccaatatttttacatcccttaattaacgaaaagtaagtgggaattaaccttctcgacaaggcggtgggctaaggatagaacggtgattagcacggcacgggctgattatcgttcggacttagcctcgagccttgtggttaatttccacgatatcttaaacaatgttcgtataaataaagaggctgttgaaaaaacaaagttttttctcagcctccattttactaaattaagttaaaaagctcaattatgcgagtaaatcagctacttcagcggttggaattcccgtaatatattgttgggttccttccgcttcaaggactttagcaatttcatcatggtcatacttaatcccttggagcttttctgccagttggttaatatcctgtgggccaaagaaatcgccatagaatttcacgtttttgattacgccatctttaatatcaaagcgggcatcaattgtccccatatcaaagtgtttccgccgcttaaccgtaaactctggcgacttaccatagacccaatcccagttgttatagtactgctcatagatcttatcaatttctttttgatcttcaggggtaaccatgtattgcttatccttaatctcctcaaggtcgtcaacatggaagagaccttttagcaattcatccctaaatgttggcacatcaatatcttggtacttttcatccaagtatggacgaagattcgtaacccgtgatcgaactgatttgatcccctttgaagcaatcttatcttttgccacatgaagggcatccgcgacgacacttaagtcaacatcaagcattaaagttccatgggagaacgtctttccattacgtgaatacatcgcattccccgagaatttcttaccatcaactaaaatatcattacgaccgctgacttctgcactagtagcacccatttgatgaagaacattaacaattggctgggtaaacgatttaaagtcaccgaattcttcactatcacttgggaccacaaaactaaaacagaggttccctaagtcttgataaacagcaccaccgcctgataaacgtcgggttacccggatattgtgttcctttacataatcatgattaatctcttcaagcgtattttggttccggcccacgataatacatggttcttcataataaaatagtactaaaggctctttcccaaaatccttattattcattaaatattgttctgtagctaaattcattccaatattatgagaagtcattgaaacataacgcataactagcaccctcttataaaaacatcaacataaatagactaaaaatttacttttgtcatttagtcatccatttgtagtgtacgtcttttcgtaagcgtttgcaatatattatcgacaaagcaaaaaatactttcttttttacatctttttagggcgaaaacattttataataaaggtataaactttcggaggtgtctattatgacagaaatttatccatacaaacacattctagttgctgtcgatggctcaaaaattactagtaacgtcttagaaagtgccattgattctgcactacggaatcatgctagccttgatatcttacggatcgttcaagtaacgcaactaacagatggctatagtaatgcggcccttagcaacgaagaaacatataacattgttaaaactaccaaggaacgactcgatgacttgaaaaagcgcgcggtcgatgcgggggttgaagatgttaacgttcatatccggtttggaaatccaaaacgtgttattgctcatgaatttccgtcagatcacaacaccgacttgattattctcggtgcgactggtgtatctggtcttgaacgctttgttcttggctctgttacccactatgttagtcggatggcaaaatgtgatgttcttgttgttcgcaaaaacgaccatgttaactaggtgaaaaaacggtgaaacaaattgttactggcatcgttgctcatgtcgatgctggaaaaacgactttaaccgaagcactcatgtatgaaaccggcgctattcgaaagctaggtcgcgtggataatggagatgcttttttagatcctaacacactcgaaaagcaacgtggaatcactctttttactcatcaagctgagctaacatataatgaccttgcgcttacccttctcgataccccaggacacgtcgattttgctagtcaaacagaacaagtcttaccagttcttgattatgcaattcttgtcgtttcagctactgatggcattcagggatacactcgcacattatgggatcttcttgctcgttatgatatcccgaccttcattttcattaacaaagaagatgtgattggtgctgatcctagcagtgttatcaaacaactgcaaaaagaattttcgccggcttgccttaattttgctgatccattaactgacgaagttcgtgaaacaattgccatgcaagatgataaagttttagaaaactacctcagtactggtagccttagcgatcaaacaattcagcaattgattaaacaacgtaaagtgttcccttgttataggggagcagccctaaagttaactggaatcactaatttcttaaatggacttgagaaatggacagttacgcctgcgttttctgatgagtttgcggcgcgggtattcaagatttcccatgatgacaagggtaataggcttagttgggttcgtgtattcggtggcaaaattccagctaaatcagttttactaaacgaagaaaaagtgaaccaaatccgaatatataacggggctaaatttagcccaactcaggttttaaacgcaggtcaagtcggtgctcttactggattaacttccacatcccctggacttggtcttggtaaaacaaagccactccctgcgccagtcataaaaccggtcttaaattatgccgttaaagttgctaaagaggaccttcatgcttgtctcaacgccttaaaagagcttgaagatgaagatccacaactacagatctcttggcatcctcacatccaagaaattcacgttcagattatgggagaagttcaacttcagatcctgcaacaattgcttcaagaacgttaccaattggaagttacatttgatgagggaaacgttctttatcaagaaacgattactaacaaagtcgaaggggtcggtcactttgaaccattacgtcactatgctgaggcccaccttcttttagaaccaggaaaacaaggctctggaattacaattaacagtgactgcagtcttgatattctggatcgcaattggcaacaccagatcttaactagtttacaggccaaagaacatttaggagttcttataggagctcctcttaccgatgtcagaattaccctcattggtggtcgcggccatattaaacatacagttggtggagattttcgtcaggctagttggcgagcggttcgccaaggattgatggaattgaaggaacaaaacgaatgtcaattattagagccttggtatgctttccaccttaaagtaccgaatgaccaagtaggacgcgcaattaatgatattcaacaaatgcatggtacgttcgcgcttgatgaagctaatagtcaagacctaaccctgattacgggaactgctcctgttgtgggcatgcgcgactatgtccaaagcgttcgcacctacactcacggccagggtcagctcgagcttgttgttgctggctattatccatgtcataatgctgaagatgttattaaagatgttaattatgatccggttgctgacctaaagaacactcctgattctgtcttctgtgctcatggtgctggtttccccgttccatggaatgaagtccccgcaatggcgcattatccgtatagaaaataggttgttgataaagagagaggctgagaaaaaacttcgttttttcaacagcctctttatttatacgaacattatttaagatatcgcggaactagcttcgcgtcgtaaccacaaggctcgaggctaagttcgaacgctaatcagcccgtgccgtgctaatcaccgttctatccttagcccaccgccttgtcgagaaggttaattcccactcactctcttttttcattcaattgtcaatagcaatccatacaatgcacctaataaattagcctcattgccaaactttgcggtcattatttctggcatcgtaacatcatcatgaagacggtaatcactcttctgcagaatcataaattgcttctttatttcatcaattaaaattttttgcgtactaatgccaccaccaatgagcacacgttcaaggtcaacaactgtctgaatatttaaaatcaaaacagctactcgccgacaaaacccttcaaataaggaccaaataactggattatgacaattaatttctttaaatactcgtcggccatcagttttatccttaatatcacaaatatcagccatggtttcaatcatcttaactgctgaagtagtagcccccattgtcgaatagtgaagttcaggcgcatcattatcaatgatcatggcacttaattcaccggcctgaaaatgcggtccatgcaagagctgattattaataacaatcccgccgccaacggaagttcctaatgtaattacagcaccattactgataccgttgagattgccaagccacatttctgctaatgtcgcacaattagcatcattaccaacatatactggacaatgagctcgtgattccagataggctgcaaagttaaaggtccccataaagccaagggcgccagtaaattttacctctccagtcgtcggattaacgactcctggaagactgacacaaatcgcagtaaccttttctaaaactggttcaaccacagcaaagattgcagccagaaacgcttctttttgatgaggagttgggacatggtttctctcaaaaatattaccagagtgatcaattaatgcactctttatctctgtcccaccaatatcaatactcaaatactgtcgttgcataactcctcacctcatttctcttatattatacacgactccgctgttgagggtaccaaatacaaatactgatgaataagcccaccagggtaaaaggcaaccaactaaagccaagttgatacaagggaaagtatttttctgcaaaatggattaatgacatgctaaatgtggtatcccgtaaaaccggtgggaaagtatttaccatatcaaaaaatgcaggaatcattgttatacctgtcgtgattcggtaaattaacgaagctcccttgaataggggcgaaaaaatacctagtaggatcaacacaatggctagcgggtaaagaaacattaaaactggtatcgaccatgaaacgatccggtccagtcccatgttagcaactagaaatgacaacaggcaattgccccgcaaaaaggctttataagaaatctgggggaaacgatagtggaagtcctgggcaaaagcgactactaaccccatcgccgttgtcatacacgtgattgtcgcaagggttaacaataatacatttccaaaatctcccatataataatgagcaatttggtttaatgttgttcccccattggctgcgattgtgaattgataccgactcgttgttcccaaataaattagtccaatatacaaaatcccaattcccaaaattccaatcattccacccttggtagtagcaagtgaaactgattgttgagatttaaaaccaagttggcgaattgcggtaataatcgtaacgccaaaaaccaatgctgctaatgcatcaatagtattatatccttgaataaaaccattactaaaggcatgattaacatattctggagttggttggggagtagttgtacttcccattggatgaacaaaggcgagaagaaagatcaaaaataacataataaggaaaattggatttaaaaccttaccaattatttcggtgatttttccttcacgcgttgcaaaaaagtaaacaattagaaaaaatgctccggtataggctaataatccccagccttgcatccctttacttaaatatggcgcaactccaatcgtataaggaacagttgccgtacgcggggttgcacataaaggtccaataattatttgaaccaggataaggaaaataagggcaaaccttttcccatttggtaaagctagttcatataatccatttgcatgtgtaatactaatcgcaagtaatgcaaatagcggtaaaagaacaccggaaagcaagaatccgcccgttgctgctatccactggttaccggctaattgtcctaaatgtacaggaaaaattaaatttcctgccccaaataacattccaaaaattagcgacccaattaccaagtaggttttacacgctgctttaattgagttcatagttaatcactcgctccttttctctcaatttaatctgacgctaaattataccatgaaatagtcgctggaacagaagtacattttaatcaaaaaggaccgttacatcctctcaaatgttaacgatcctttaaaactaattttttaaaaagttagctactagtttcaaaatttcttggcgtcgtgagccattaaacatatgcccttctccaggaattaaatgcaactcactgttaggcatgattacattatatttctttgatgcttcaggggaaaccacattatcagctaacccatgaattagcagtgtggggccactataatgttgcgctgtttcgtaaattggtaaaagctgcgccgttcggaagtagtcgccgccaacggtaaagccatgcatatcaaccgtttctggtatatggttaaggtcatattggcttccctgacaaacaccttttagtgcatcatcttttaaggttgcagcaggtgccagcagtactagttttgtaataatatcgctataataagccgccagcatcaaagcaactaccccaccttgcgaatgaccaattaggtaaatcttctttgcttgcatagttgtgtgagcatagtcaatgattttcattccatccagaatttcactaaaaactgtcatatccttgaattcaccatcactatgaccagtcccatcaaagtcaaagcgtaacgttgaaattccttgttgatttaaatagtgcgaaagagcatacagaattttagaatcatcatatcccagattgcccttaaagccatgcatcagaattgcgactgtatcgtttttaatcgtcgttgttccctcaagaagaccatatagagatcatctcgtttgattgttatttccatcaaaccacctcccacttattatacactgtttgatttaatgttttagcttctccaacattgcacggtggtgtgcctcgtgtttctcatccaccttgataaagaagtaagaaaccgcagccaatacggcaactacaacaccaactgtaatcgtcttaattgtaaaattggttctcatatagcatgagattaagagtactaacaccggaatgatatattttccgagaagcttaaacccgtgattagggaattcattagtatgtttaaacttaattactgctaaaattgatggaacatattgaacaaacgaagcaagcacaatacaagaaacaagaaagaggtaagattgagtaactaataacatcgaaacaacggctgtcaggataatcgctacccatggtgcatcatggcggttctttttaccaacccactttggtaacattgcgtgttcattcgctagtgagaaaattaatgacggagtgttaaaggaggccgcaaacgctaccccaaaaatactgatcaacattcccacaatcactaaaatgtaccccccatttaccgacaccagttccaaaagcattggcaattagtgtactatactttgacatcctagttcctaaaatacggattgctactagcatcattagcgaatacataatcgttacactaaccattacggcaattaatacgcgcggaatatttttctctggatcggtcatttgttttgcagcaattgggataaaggaaaagccagtaaacatatagaagacaacactaaaggctgctccaaaatgtttggcaagcggcattgccccggtggttgctgcatgagggattaccggtgaaaaattagcaaagtgaatacaaaaaacgccaataacaataaaagcaaggatcgtaatcatttttgcagctgaagagaggttatcgaccaacttaacaagcgtccggccgaagaagttaatgattgaaaataataaaattaagccaaaaacagaaacatagtatacccaatgagtattaaaaagtggtaaaaagcttcggagagttgtcaataaggctaccacttcggcagataaagtacagcatcctaaaagccacgtaaagatgccgagctcatagccagtaaaccggccaaatgcattatatgaataaagccaagccgcacctgatcctgtaaaacaactagaaaggtccgcataacataacgcaaccatgctaaccgtaatagcggcacagagtaagacaaggacacttgctaaatccatatctttatagataacttgtggtagcaaaaaagcacctgacccaataacaccattaatacctaaaaagtaaattgaaatgaacgataactttttaggatttttctttttcgtattgataagctccaccttctatcctttataacaaaaataatattatcttcatttaaagtctattcttattttaaaggctttacaggtaagcaagttaaccaatttttatatttctaaacaaaaagagaccgagttaaactcgatctcttttcttaatttattaagtgtttaattagcaatcagtagctgattacttaagacccttccaagtccagttagtaacttctggtaagtccttaccttctgaacggatgtagtggttgtgcttgttgatcatgttgtccatcttggcaacaaatgcagcactcttttgttcgtaaccaggaacactttggatagcgtccttagctaagtggaaccggtcaagttcgtttaatacacgcatgtcgaatggagtggtgatatcaccattttcttcgtatgagtgaatgtgaacgttacggttagcacgatcgaagaacaatgcttggatcatgtcacggaatccgtgccatgcaaagataactggcttgtcagtagtgaagtaacggttgaattctgcgtcagacaaaccttctgggttcttgtcttgcttcatcaacttcatgatttcaatgatgttgatgtaacgaatcttcaattcagggaagttgtcatgaagaatgtcaatagctgcaagagcttcttcagtaggttcagtaccagctgaagcaaatacaacatctggttcgctaccttggtcagtagatgcccagttgatgtagccaagaccattgtcaactaattcagtagcttcatcaatggagaaccattgtgcacgtgggtgttttgaagttacaaagaggttgatacattcttggttacggaatgccttgtttgatacagccataagtgagttagtatcagcaggtaagtattccttaacaaggtctggacgttccttttcaaataagtgagtcaatagacctggatcttggtgagtgtaaccgttgtggtcttgttggaatacagttgaagtatcaacaaagttcaatgctgggtattgacgacgccagtaaagatccttagccttacgtaaccacttcatgtgttgagtaagcattgaatcaacaacacgaccgaatgcttcataagttgcgaagaatccgtgacgaccagttaatgtgtaaccttcaaggaatccttcagcttggtgttctgataattgagaatcaatcatccgaccttgtggagcaacgttttcatcgtttggttcgtgaatgccttccatccattgacgcttttggttgtcaaggaatgcgtaaagacggtttgacttagattcgtcaggaccaaatccacggaagttagttgggttcaattcagccatcttgctgaggtacttaccccattcaagcatatcttgctttacaacagaacctggagtttgaacgtcaacagcaaagtcacggtagtttggtaatacaagtggcttaggatcgataccaccattagtgataggattcatagccatacgacggttaccttctggtgtgttctcttcaacaagagcaactgggtgaccgttttcgtcaaacaattcttctggcttgtatgacttcatccagtcaataagcatgtccttgtgttccatgtcatcttgtgataccggaataggaatttggtgagcacggaatgagttttcgattgggttaccatcaagatccttagtaggaccagtccaacccttaggtgcacggaagatgattaatggccattgtggtaatgaatcatcgttgttttcacgagcgttcttttggatagccttgatttcttcaacagccttatccatagtcttagccatttgttcgtgaacttccatgtgtggcttgtaaccatcgaattcaccatcacggtcagcttctttgtaagctgatacgaagtatggcttccagcccataccttcaaagtacttagtaagttcttcgtcactcatccgtgaaagaatagtagggttagaaatcttgaatccgttaacttggatgattggtaataccgcaccatccttgattgggttgatgaacttgtctgagaaccatgatgccattaatggaccagtttcagcttcaccatcaccaatttcaacagcggcgataacatcagggttatctaagatagcacctacaccgtgtgaaagtgagtaaccaagttccccaccttcgtggattgaacctggagtttcaggtgcggcgtgagatgcagtaccgcctgggaatgagaagtgcttgaataacttagccattcccttagtgtcttgtgtgtattcaggataaatttcagtgtatgaaccatccaagtatgagttgttaaccataacttggccaccgtgacctgaaccttcaatgtagaacatatcaaggtcatacttcttaattacacggtttaagtgtgcgtaaatgaagttttgaggaacaatagtaccccagtgaccaattggcttaggcttaacgtcttcagcctttaatggttggcgtaataatggatcacccattaagaacaaagtaccaactgaaaggtagttagctgcacgccagtaagcatcaacactttccaaatacttcttggaatcgtaatctactgccattctaataaacactccttctatataaatcaatacgtcctgtgctctataacaacataacgtaaatcattaaatttacaatgttaatgataaacttttttttcaaaaagtcaacctttttacaaattgatacggtccaattataaaaaattaatctttttaaggtgttctttaacatttttctatttatcttaatccgcagaaatgctaatttacctttgtttaaccccgttcaataccaacagtgtacaattaaaatttcttttgaaaaaaataaattttacatctattttaatactttaaatactgctatcatattcactagttttcttggtctaggctaacaaaagtactatatttcatgtatttatagtgaattcgcatattagaaacttcaaacggcgtcccatcatccaaaaagaaaatcccttcaattgttccaaccggctctgtttcattcaacttcaataagtcttgatcttcatttgttgacggcgaaacaccaatcgtcataaatgactttgtaacccttttccccatcatatcttctaaataattaaaaattgacccattaacaacttcgggagaaagagtgggcgtaattctaattggaataaaacccgtttcaatcataaacggctgatcatcaattaaccgtagccgtttaatctgataaacaaagtcgttatcattaagaaatagttcttcttgaacatctttacttgcaggaacaacttggtaatcaagtaattttattccttgctttttaccatctacttggaaactgtccgttacacccaaattactaccttcataatggaacaatgactggttttttaggtataacggattaataaatgtaccggatccgcgtttcttaaaaataattccttgctgagcgagcactcccaatgcccgttttatggaactgcggcttacctgatagatttcacttaagcttcgttcatcaggtaaacgcatcccttggtatttattgtctagtattttttgttttatatcacgcatcactgagcgatatactaagtctgccatctaattaactcctcggatttaattaattcgcaatttaagctacacttttagtatagcaggcctattttaaattgggatccttttgtaaaatattggtgcgtcccagataaacttaggaggaaatttttatgagtaaaaaaaataaaaaaagcaaaatgaaaaaaacacaggtagaacaaatcctcgataaaaataacattgcttacgagcaagctgaatttccgactcaccaagatggcgatgtacgttcaatgagtgttgatcataccggggttgacgaacatattatttataagaccctagtattaaccggtaacgtaaccggaccgctagttggcgtcatcccagtcgatacacacttagatgagaaaaaacttgctaaggtttcgggcaataaaaaggttaatatggtgccgctaaaaaatcttctcaaaactaccggatatgtgcatggtgctaacacccctgtaggaatttacgagaagtttgaataccctatttttattgataacgaggccagagaacaaggcgatattttcgtttcgtcaggtaaagtgggccgttctattaaattaaatgccgaagatcttgccaccctagttcatgctactttcgctgatttagaacaaaagtagtttcttgacgattgacccggttaatgttgaagattaaactgattattgtagtttgtttgatagaaaggtcctgaaaagatgaaaaagaatttatctgcttgtaccactgtccttgtgggtcgcaacgcaacgattgatggttcaacaatggcagcacggaatgatgatacatttggtccacttacgccccaacgcttcgttacttatcccgcatatcataatcaccctaaccaagtaaaggcatacttaaataaatgtgtaattgatcgccctgctgatggttatcgttatcaaggtactcctaatgttgattatcgaactgaaggggtattcgatgagagcggctttaacgaaaaaaatgttggaatgagtgcaaccgaaagtgtttatgcaaatgaacgcgtccttgcctgcgatccgcttaataccgaaaccggaatcaatgaagatcttgtggtcgctgctacccttccctttatcgatagcgctcgtgacggggttgcataccttggtaaactagtcgccaaatacggttctgctgaaggaaacggtattatattcagcgacaaaaaagatgtatggtatatggaaatcgtcactggtcaccactgggttgctcaacggatccccgatgactcttatgccgtaactggaaatcgagtagcaatccagcaagttgactttaatgaccctgataactttatgtggtctgacggcatccaagaattcgttgagaaaaaccacctcaaccctgataaatatggttgggacttccgccatatctttgggactgctgatatttttgatcaacactacaacacgccacgccaatggtacggtcataaggtattaaatccggaaactgaatttgatccgcttgattttgatattccatttattatgcaaacggaccatcgaattacccttgaagacgtcgaaaagatcctcagtagccactaccaaggaacaccttacgatccactaggtcatgaaggtaccgaccagcaaaagcatatgttccggccaatttcactaaaccggacgcaaaattcccacgttcttcaggtccgcaatgacttaccggaagctgcttcaacgattatgtggatgagctttggtattcctacctttaccccatatgttccattctttggtaatgctgaagacattgatgtaagctatcgtgaaacaccagagaaactcaatatggatttaaagagtgcttactggatgtatcgggcgctttcaatgattgtcgaatcacaccatgcagaattttctaaggccgacttggattatctcaaagatgcccgtgaatatctctaccgctgggtcaatgaagttgctccacaggttaaggggatgtcatcttctgaagtcagtgctttcctaagttcaaagacgcatgaaatggttgccgaaatggctaaacgaacaaaagctttaatggctgagttagtaatgaatggactcgaactttctaagttaacattccaaatcgataaaaacttgtaaaaataaagatgaggctgagaaaaaacttagggcattatcgccctctgttttttctcagcctcaactatttttatgaacaataacaagataacgtgcaaaacaaccacatttttctttaattatttccagcaaactgactattataaagattagcgtaaaaaccttttttattcattaatgattcatggttacctgtttcgataatcttcccatgattaaccacgacaatctggtcagccttccgaatcgttgacaagcggtgggcgacaacaaaactagttcgttcttgctgcagagcattcatcgcttcttgaatcaagacttctgttcgggtatcaacagaactagtagcttcatccagaattaaaatttccggatcagctaaaaatgcccgtgcaatcgttaataattgtcgctgtccctgtgaaatattagaagcagactcgtctaagaccgtttggtaaccatcaggcagttcacgaatgaaagcatccgcccgagccatcttagcagcatgatagacttcttcgtccgatgtattctcgttaccatacttaatattttcaaaaatcgtcccagtaaagagccaagtatcttgaagaacaatcgcaatatgcttacgtaaggtatcacgagtcattgaacgagtatctttcccatcaagataaatatggccgccttgcggatcataaaaacgctctaaaagattaataatggtcgtttttcctgctccggttgggccaacaatggcgaccatcttatctcgtggtgctttaaggttaaagtcttgaataagcggttcatcagtatagctaaacttaatatccttaaattcaactttcggaatatcctttccagtaagggatggaatattctcaaccttatcactcatctctggttcatctaaaacagcaaaaatacgttctgccgaagcaattgtttgttggatggtgttacttaaattcgcaatttgggcaattggttgagaaaactgattggtatattgtagaaatgcttgcacattaccaagagtaatctgaccatgaataacttgaatcgctccaaccactactacaacaaggtacccaagattccgaataaagaccatcattggcatcattaagctagagaaaaattgtgctttccatgctgcttggtagtactgatggttctctttattaaacttttcttcttcatcttgttccttgttaaatgtccgcacaatcgtatgagcagcgtacgtttcttctacttggtcattaatttttcccaaagcggcttgctgacgaccaaatagacgttgtgaagttgaggcaacaaaagcaactaccagaatactaagcggaattgtgacaagggcaatgattgttaatttccaactaatcgtaagcattaaaatgaaaacaccaacaagcgttaacaaactcgtaatgatttgaatcaaactttgctggagggttcccgcaatattatccatatcattaaccattcggctcataatatcgccattattatgggtatcataatatttaattggcacccggcgcattttctcttcaaaatcttgacgcaaattgtaaacaacacgttgcgatactcgtgtcataatttgtaattggaggaaactaaatagtccagagaacaaataaagcaaaatgactgtaattccaatttgccaaatccgggtaaagttaattggaagggtacttaagtgggcaccagctttcatttctgcataccctttaagcattccatcataaatgatcgtagtagcttcaccaagaatttttggtgctaagattgacaaaataacagaaataacagctaagagaattgaaacaataaccccaactcgccatggtcgtaaataggcaattaatcgctttgtggttggccaaaagtgttgagcctgttcaggtacttgtggtcctctacgcacgatcaacatcccctttctcgacttgtgacttaattatttgttggtaagtttcattatgtgcttttaattcttggtgagttccttgaccaactacccgtccttcttcaagcacaataatttgatcagcatcaacaacagtagagattcgctgggccacgataaccgttacagcacgttgaatttgtgggtcttttgctaaagcagcccggagttttgcatcagtttcaaaatccaaggccgaaaatgagtcatcaaaaacataaatcgatgcgggcttaataattgttcgagcaatcgctaaccgttggcgttgaccaccagaaaagttactcccgttttgctcaacaactgcgtccaatccgccttcttcacggacaaaatctgctgcttgcgcaatttcaagtgcatgccacatttctttattcgttgcttcctcatacccaaattgaaggttagaccgaatagtcccactaaaaagaactgcttgctgttgagtaatagaaataacctcatgcagattatgctgacttaactttttaactgggacaccatcaactttaatctccccgctttcaatatcaaataaccgcggaattaagttaaccaaagctgatttacctgaaccagtccctccaataatcgctaaagtctgacccgctgtaactttaaagtttaagtcatgcaaagctagtctttctgccccatggaaacgaaaatcaacatttttaaattcaagggaagctggttgattaatcgaaatcttttcttgatccttttccggtgcattatgaatactgattggctggtccaagacagcattaacacgggtagcagatgccgatgctcggggaacaaagacaaagatcattgaaagcatcataaagctaatcataatctgagtggcatatgtcataaaggcaattaaatcccctacttgcatgctcatattagctacaagatgaccacccagtagaataatggcaacatttgtcattcctaaaataagcgttaccactgggaatagtgtcgaaacaattgtaaaggccttgattccggtttgcgtgtagtcctcgtttgcttttttgaagcgattttgttcccaatcttcctgccgaaaagcacgaataactcgaactcctgttagcccttcccgaaagattaagttaatgcgatcagtttttttctgaatgctcttgaataacggaaccgcaaagtacataactgccatgacgataatcgctaaaactggcaaactaataaaaaacactttagttagttgcggttctcgaacatacgctaaaacacaggctgcaacaagcattacgggtgattgaagcatcatccgaagcatttgcaccatgacattttgaatctgcacaatatcattggttgaccgcgtaattaaagatgaatcgccaaactcatccatttcgcgattcgagaaacgtaaaaccttatgatagatctggcttcgtagcttttcacccaccttcattgattgggtcgccgcaaaataaacatttaatccggcggccactaatccaatcgcagccacaattatcattttaattccttcattccaaattacgcccatatctttttgcacaattccccgattaacaagatcggcggtaactgtcggcaaatataggtcacacgaaacttggattaataaaaagaaaactgcaccaattgttgcccaaaaggctaaattttttcgtgctatccgtatcattgctattcctcttcactttatcgtcaaattttataattgtttggtatctaacttttatatattactctatttaattaaaattgcaattaacctaaatttcaagaataagttagccactggactcaaataaataatactgaccaattgattattggttgatggagctgtgatatctcttggtagaaggccttacgatagatatccattgacgaatgtccattaaacatagctcgtggatagtgattcatccaatcattagtcgctatgatctgagcactactatagttatttatagcttcacctttggtaatctccttgcggagaaaccggttattgatctcattggatccacgttcccaaggggaatacggatcagcatagaaaacatgatcgtgaacttgtgttaactcactaaattctgaaccgttgtcagaggttattgtcttaaagatgcgatagtaagcatctgtgcccattttctggcgtaaatttataaagaactgatttactgcatgcgcagttttaccagcaattttactcgtgatattaactcgtgaaaggcgatcagtcattactagtacaacactgtcattaccgtttttctgtccctgaactgtatctagttcccaatggccaatttcagaccgttggtccgcagtttgaggtcgttgagcaatattaggccctaagcaccttttagcttgcggatgagttcgatgatgcttacgtttaggtttttcaaagaggtctaaattggacgtacgaagcacaccctcattaatctattgatataaagttacaaccgactttgggatcagggtgccatcattcattaaatctcgagccttataaataaccgcttgtggggagtaatggtggtcgtcaaactcaccaagcattagctgatcagctaatcgtaaaaattgctttgaagaataatataagcgacgacgaccagaatggcggtgatgttcaagatatgtggcctgaccagcttcataactatagatgtagtaagaatattcgtaaatcttaccattagatttttgacgacgaagttggcggaccgtaccacggttgagctcgttattaattgtttgatgattaactcctaattggcgaccaattgcgcgattggaaagtccttgcgactttaaagtcgcaatcatcacacgttcttctttagtaagatgagcattctttttatgagtagtcaataaactagtagacatggtatcatttaagtgcgtcatttgacggacatcctttcatataggtttggttcacttaatatgatacctgatgtcacgccgaatggcgttttttatttaccaccaactgggtggctaacttcattctataatccaccaaattgcaattaaaagctttatcacatgctttatttaaaaataataaatttttgttttaaccatattaaaataaaaattttaggctaaaatataagaaggaacatgaagtaaaaagctccagtctgtttatttttaagaaacgaggtttgatattatggctgaaacagatgttaacccagaattagttaaaaaaatcgttaaacaagtattggctcaatctgctaatggaggagatagcaccaaaaaaatttttgcttttagtatccgaaaagatgaagaaccttacgttaaagaatgggctaagaaccatcccgaaatagaagtagaatatacggatgaactcttaactcctgaaactgctgcaaaagctaaaggagctgacggggtagttgtttaccaacaactcgattacacgccagaaacgctacaagcactggctgacgaaggcattacaaagatgtcgctacgtaatgttggtgttgataacattgatatggctaaggcaaaagaacttggctttgaaattaccaatgttcctgtttactcaccaaacgcaattgccgaacatgctgctattcaaacagctcgaattcttcgccaaaccaaggtcttagatgaaaagattgctaatggcgatttacgctgggccccaacaattggtcgagaagtgcgtgaccaaactgttggtgttatcggaactggtcatattgggcgtgtttatatgcaaattatggaaggcttcggtgctaaggtaattgcatatgacccatttgaaaatccagaattaaagaagcaaggatattacgttgacagccttgatgatctatatgctcaagctgatgtgatttctcttcatgtcccggctactaaagaaaacttccatatgattgataaagatgcaatcgctaaaatgaaagataatgttgtaattgttaattgttcacgaggcgcattagttgatactgatgctgtgattgaaggacttgatagtggaaagatctttggctttatcatggatacctacgaagatgaagttggtatctttaacgaagattggcgtggcaaggacttccctgacaagcggcttaaaggtctaattgatcgttcaaatgttcttgttactccacatacagccttctatactactcatgctgtccgcaacatggttcttaatgcctttgacaataaccttaaattaattaatggtgaagaagctgacacaccggttaaagttggctaataattattaatctttcttaaaaagcccgactattagtgcaagactaataatcgagctttttttgttcactaaactagtgccgtttgtaaagcacacgcaagaaggcccccaacaattgggccacacattggaacccatgcataccaccattctgaaacacccttattaggaattggcaaaatagtatatgctaaccgtggtgaccaatcacgagctgggtttaaggcaaagccagtagttgtcccgagacatgtaccaacaactgcaataaccattcctacgataaatggcttcaatccctgtgtaaagttaccaagatttaataagatgaaaataaatgcaaaggtcgcaatcacttctgagaaaaagttaaaaattggactatttatcgctggacgagtagcaaaaataccaacattatttccttcttcttcatttggggttgctttaaattgtggatagaattgaataattactaatactgcaccaacaaacgcaccaagaaattgaccaagtaagtaaggtataacgttactccatgggaataagccaaaaatagcaaaaggaattgttacagcaggatttaagtgccctaatgagcccagaaatcctgcaacataaactcccatcgtaactgctaagccccatgaaatacagataaaccaccagccactttgtttcccataagttttatttaaactattaccagcacaacatcctgctcctaataagatcaaaaccatggtgccaaaaaattcgccaataaatccatgcatgtctaaacaccaacctttttaatttttcttcaaaataaaacctaacatcaagagaataatcaccaagaaaatcccacagtaaatatatctttgcggatgtccttttacgtgtccgtaccgataatcattattataacgttgcatggctcctattattaatccactgattccatttattgttggactaagcgcaaaggacgccgacacttcgcttatttcattattaataaagctaaaaataataaaaaggactccaatcatcaccgttgaaattatcgttgcaagattaattccaactaacatttcatagataatactgttattagctggaaccttaacaagtattcttggcatctcttgccaacttcttgcaataaagaagatgagtaaaaagcaattaccaataataaacggtaaagtccaaccattatgtaattctaaacttggcggaattacaatccctgcagcgcatagaactactattggccaatacatcgaagcaaattttcgacgtgattgcggtcgttccaggagagcaaaaaattgtcccaaaagagcttgtaagaaatttaaaacgataaatatcatgacccatatatttaagtagctaggaattaatactactttaggctgtccccaggccaatacaatcgaaataattaaaacaatagctaacaacaaagcccttggtgcataaggggacagatttcgatatttttctgctcgttgataaattaatatcaggttatacatattcatcactaaaatgacagctgaaaccagtaaagtagagtcctgcaactgatttggggatgggggttctccacctaaaataatatatgctgacattgtacaaagccatcccactgtccacatcaatggaatagttggtgtcaagattaatggctgacgcggcaaccattgttccatgtgaaacacctcctcaatatggtatcttaccataagaaattgctcaaaatctggtaagataaatagtagttagttttaggaggtaaatttttatgtttttaccacaattaggattaaaaggaagcagtcaactagaccaaattgaggatcgcttacagtataatcctactatttatgaattttatactaatgctgatgactttactgatgaaggctaccaacgcctctatgatgctattcaatacgttaaagatgctggaattaaaaatattattctacatcacccaatgaagtttcaggatcatcattcagaagtagtggcccctgaaaaacagtatcctgacctatatcgctttatcgaatttacaactgaaaagctcctttatttagctgatgatcttgatgttcaagttttggttcatggtggttatgctggtcctgagtcacgttactttgtttcactctaccctagtgtagaagacgcccgaaatgctgtttatcagcggttggatcgttttgcagatgctggtggagagcatatcatgtttgaaaactcaattgcgccagtttttgcttatggcgatccccttcaagaagatgaaattcttgcacatgattatcgacttgcctttgatacatcccattgttttattgaacttcatgggaataatcagaaattggccgtatccctagcgcatttaaaagatcgtaccgttcattaccacctagttgattcaatgggcgaaactcatgatagtcttactctcggcaccggtaaaattgactgggctaacgttttgcctcacttaaatccagctgctactagtatttatgaaattaacttacacgatcaaaataattgtcgtgaacaaattgacagtcataattatttagttaaactttaccaaaagcttaataatagaggagtttaatcgtgaagcaatatattaatcaccgtcatatttctttagtattagccctatttatcctctacttagcaatcacttactgggaagttgttgctaaatttatccaaacaattttttcggcaaccatgcctcttttaataggaggaatagtcgcctatatcgttaacctattattaagacagtatgaatacctttactcgcatttatttaagaagccaagtttgcaaaaattcaagcggccagttggaataataatgtcctacttaacaatcctcctaataatcaccatcgtctttgctctggtaattcccgaacttattacgtgtgtaaaactacttattgcaaatcatagtcacattatcaaccattttattgattactttgaacatagcagtgattttaagggcttcatcaatagctttgataccagtaaaattcaatgggataaaattggtaaataccttacatctggtgttggtggaactttccggacggttatttcaacagcctcgtctgtattttcagttgccacaaccgcaattattgcgtttttcttttcaatctacctcttgatttataaagagatgttgcaacgtcaatttactaaattactttcaacatactttagccgataccagacacaaataattaaagttctgaaagtttttgatgaaagttacagtaactatattgttgggcaatgtaaagatgccgctattcttggaatctcgtgttttattgggatgacgatcttacgaatgccatatgcttcaatgatcggagttgtaactgcatttggtgcattaattccaatcattggggcaatccttggagcgagtgtcggagtaattatcattttcgccgtttctccacttcaagccggtattttcttgatctttattattcttcttcaacagttagataaccgcattacctatccactagttgttggaagatcaattggtctcccaagtgtatgggtatttgctgcagttattattggtggaggaatttccggaattcttggaatgatgttcactgttcctttatttgcagccctttataaattgttaagtgctgatgcaagaaacagaataacaattcaaaaaatgagtgaaaaaccgtagcatttttcactcatttttttataagttatctggaacatcagcagcaggttggtccttagttagtcgataaacttgcgatgtatttacaccaaagtactggttaattaacttactcaattcttccatcgcttcattagcgcgttcaatttgttctggattaattgcttccataaccgcaactacattttgagaatcttctgtcaacattgttcgttgagcttcacgccaatttagacaacgacaaacagcaccttcatcgtcataataaataacttcccccgccaaagcaggttcatcttcttcagcaccgactggccgaaatgcttcgccaccttttgcaacaccaagatgaaggttgccagcaatcttatttcgatcttcaatgcccactggaacaccgtagcttaaagaaatactattgtagacatccacaagaggttcaattggttcaaatttccgtccttgattggcacgcttcaataaggcctcaattgatgagcgcgcacctttctttttcttaaattgttgaaatgcttgacgccattgatcaacaactggattcaaacgaaaagtctcattggttagaaacttatcagcctcatgagtagcatttgctaatagtttctttcgttcatcatagttgtcatcagtatcatggttatcaatgccatttgcaaacaagatatttacctgtgcatctggaaaaagttcccaaaaacttggatcaatcgtcacttgcttcataaaaataatctcctctttataaattaatattgacgtttgcccccatgctttacggtatcccaatcgccatcaatattttggcggatacgaactagatagtcatgaacctgctgagcctctttttccgagaagcctttcaatgcctcactatttgaaaattggttttcacgaataataaaaggataaatctcttttcctttttgagtaacataaagtcgtttaattttcttattcgttggatcactttttctttcaataaagccatttttttcaagcttttttacagcacgggcaatcgttgttcggtctacttttatcaagtttgataattgttctgaaataattcctggatgctcataaatacgaacaacatacaggtattgaccacgtgctaagtcgatttgcttgaactcaatattggcaatcgaatcgagtgctcgatcaatcatccctatttcacgtaaaatatcaatcattgataaaaattctccttaactacaatattaagttctttttgttgtaattgcaacaaaataattagctttaattattttccaacggcgcaggctgagcgactttttgcatggctgttaataattgagctgcatccattcgcgataaaactgatttcagtgctaatgtcattaagcgatcattttgtgtattaatcacattattacttggaatttcttctccagctaaaagtgcattcaaaatttcaacaaagcggtcataggcagcttgcgggtaagaattcatagtaacctgagcaattcctgcacgaatatcatccagtgaaaaattcgattttaacaatccaataagcaaaagatctactaattggttaacggcatactttttcttaatcggtgcttgaataactttctttttcacataattatttaccattgattttgtaagtggctcaattcctaaatgatttaattgttcatttacaatcgccaccacctggtcaacatataaacctagtgtaggtaattctttccatcgtggaaaccgcacccgtgctaaattattttgccatcgttgatattcttctaatttatccatatcacaacctgctttcttatggtgcaattccaatcgattgattccgaaaatcatcggtagtaactgcctgttcaattatctgtgctacttgtcctaatccaatctctttaccttctaaaggattgccttcactaacaaccttaagtgaagtttcttcattagtaattggcaaagctctaataatagtatagggcaactcaaattcatcaatcattttaaccgcatattgatgagcaaggacagtctgagttgcctgttgcccataccattcctgtagttgctgatttgtcgcatcatctgctgttcctgcaatcgaaagcattactatttttgacggtaaaaacagtgagtgatcaatcaattcggctaactcttggacttcatcatctacatactcattaacagtgggaagccaacataatatatccccacgctgaatttcaaatttaaaactagtaagagcaactgcttctggaacccttttgataatagttggtactaaatcgtcatgccggtgactaataaaaactatccgacccatcacaacctccaaatctattagtaagccatcaattcatcttcaatcgttgcatcttcaattctgacatcagtaatggtgctttgctctagtaatggcagtaatgtttgaatatttccagtgaaaaggaaacgggtctcattacctgcttcttccaacatgtgtgcccctaactttactgcattgtcgattgggaaaccagttcccattactgtcacagtacaatctactccatcattcatcgacaaatcacgtgcagaagtcaaatgactgccattaaagtaataaagagtatgagcaaaccgcatcaatgttgaaatatttttgcttgtgaaaagcactaaggcatcgaccttttgagcatagtctttaacaaggtgaccaatcatttgccgtttattttcctctaagccatcaaaggcatcattcaaaattacgattggacattgccaagcaaggagaagtgctatccgcagttctagtcgttgtgcctcgtttaatgaagcaatcatttgatcaggttcaaatttcaatgatttaagcatttggagtgcttgttttgacttcaaagcatttttacgatgacgtaatgcgtggtcaacagcttttgccactgtctttccttttaaaaccacatcatcaattcggccgatttcatttttgctttggcgcttatattttttgaatggaaccccgttaattgttacatccccatttaagatttttccacgaacagataataaatcttctaatgcagttgctgcgcctgtatcgttactgcaaattccgactacttgtggtgactttagttctaatgaaacgttatctaattgatctcctgatttagcatcatagactaaatcattaattgtaatactgctcactatataacctcttttcttaagctatctacctttactaatcttatcattttttaggtaatgaacgaaataaacatgtctttctttttaatatgctttaatttataacgacttatttgaatggtaaaataatatacataaattgtacttatcaatcgaaatgaggaatgttattttgaatgagggccaactattcactaattttgtaattataatcattacatttatctttgcggcattttttgtggcagccgaatttgctttagtgcaagcacgggtaacagccctagaagaaatgcaagcaaagcgcgataaaccatctaccaaaataaaccgcgcaatcaaaatggtcaccaatctaacagaatacctttcgaccactcaagtaggagtttcaatttgtggaattattctcggttgggtcggtgaaggaacgattgaagcactcttagctgatgcactttcgttaccaagctggtcactaaacaatagtgtcatccatgttgtaagtgccattgtgggagttcttcttctaacatatttcgaagtagttttaacagagattgtacccaaaaacatcagtattgatattccaattaagaccctgatgttcgttaccaccccactgcactattttcacattactttttatcctttcgtttggttgcttaatagttctgccaacggaattgttaaaatgttaggcatgaagccagctgacgagagccaagacgtcctttcgcaaagtgagattattagcctatctcgaaacgctgttaaaggcggtgaacttgagcacaatgacttgctatatatggaacgagcctttgactttaacgataaggttgctaaagatattatgatcgatcgtactcaattaacagttattgatataaataaaaccgtaaatgacgcgattaaactatatcttaagacgaaatatagccgcttaccggtagttgctgataatgataaggataagattttaggttatgtttttaactacgacctaattcggcaaaagcaaatcaacggagatgtatctttagcaaaagttcttcgccatatgcctactactcctgagactacctcaattaccgaagtccttaagttaatgattagtactcgggtgcccatggtagtcgttgttgatgagtatgggggtactagcggaattattactgacaaggacatttatgaagaactatttggaacagtaagagacgagatcgacaaggtttcagataacatgatttctaaaattgatgaaaatcaataccggattgatggaaaaacgaccatttatgattttgaacgcttcttccatgttgaacttaaagattctgaagatagcgatgtagtaactttatcaggatatgtgttagataattatcataatattcatgaaggagaaacgatcaaactagccaaccttgagttaaaaattcaagattatcgtcattcatatattgatagttttattgttaccactttatcaaagtaaaattttacattttggcagcaataagaaaattatccttttatttaacacttaattctactaaaataattttgtaatattaaagtaaatctaaactagaaggaagaaattcacatggcaccaatgaatattatttatatctcgcttgagggaaatacccgttccttcttaacgcggatgcagggatatgctaaacaacagcacagtattagtgaagattgtccacttattgaattaaaagaagttagcgatcaaacgcttcctgccgatgaaacagaacccttctttgccttcgtacccacatatttaaatggtggtaacggaatcgattctggtttcactgaaattatgacaaatgcattaggtgaatatatttcctacaacgataacgctaaaaaatgtgtcggctttgtaggtagtggtaataagaattttaacgaacaatattgcttaactgctcgtaaatacgcgcgagactttgacgcaccatttctcgcagactatgaattacgaggcacttcacaagatattgagcgaatttatactatcttagctaaacggtggagcgaagttaacgcctaacttctaaaataaaagcgacttggaaatccaagtcgcttttatttttagccttgtttattagcacttatcagccatgttatcccatacttatctacaatctgccccattacattatttaggatccaatcaccaaatggtaccgtcacacgttgattgtctgattttgctaaacgattaaacaaatcacgtgctttatcttcctcttcttcaaaatcgagtaaaattgaaattagtgtagacgtttggggattgcccatcgttgcatctgcacaaataatcttttgtccagcaatcataaattcaccacgcattgttgtctggttcaattgatcaactggtaatccaagactttccgcctgctcttttgtcagagactcgtgatatgtaatctgagcgccaaagtcttgttcataataagccattgcttccttcgcattctcaaatgttaggtatgggtatatagccgtcatagtgttcctccaaaaatattcattgttgattatatattttgaatcgctttccgtcaaactagcttccaattggattagctacttctaaccgtatattaatcataactaaggccccattatgatataattgtctagtctattatcaagctaattttaagatggaaggatgaattttttgaaaaaactcaaaaagcatagtccgcttctaatccttggattattcttccttgggatctgtatgcggatgccgattacagcaataccgtctgtcattaaagatattgcacaaacttttaatgtagaaactactagcttaggaattttaaccactattcccctcctttgttttggattattatcatcagtagtttcagcactcgctcaaaaaattggtaatgaactaacgattgaattagcaatgattttaatgtttattggttcttacctacgaattttaaatttctcctcgttaatgatcggaacaatattagtcggggctgccatcacttgtattaacgtcttattacctgcgattatttctgacaaacttcctaatcaaattggaagtgtgaccgggatgtataatgtcgcgatgactttatttgctgcaattggtgcttacgcaattactccaatcacccatgctactagttggcaaaccgctgttatcattattagtattgttgctttaattgcagcaattatctgggtaccaaacttacgctataatcaacgtgccactaaagaaagcagttctactgagcgtggaactaacatgtggaaaaatgcaaatgcatggtggttactcttattcttcgggggacaatgtttcgtattctatagtatcgttgcctggttacctacaattgccatggacgctggattaagcagtgataatgcaagtttagttgctggattactacagctattatcaatgccattcgcctttgtaatcccagtgattgccactaagatgaaaaatcggcaaccaattatgctatttgcaggaatcatttctttaattggaactggaatgatgttcttccctgtaaattctcttgtttactatatatttgttgccctatttcttggtgccggtacaactactactttcgttcttgcaatgaccttgttcggactaaagactaagagttctgccgatacccgaaacctttctggaatggtccaatcagtaggatacttaatttctgcattaggtcctatcgttgttggaaacctttattcacaaacacataattggtttgcaagtttaatcgtgattgctattgcagctatcttcttcacagtctgtggtgtaatagcagaacgtaaacaatttgtttaagatatctttcaaagctgcggaatttttcccagcttttttagttagttttgttttcataagctataattttaaccgattccaaatttcttttaaaagtttttttgatctagaccattaattgataaacgcttaccaaagactaatcaacaagccatttagcggtagtggtccattttaactttctaagacatcttctcagaaaacgtttcctttgatagtgcagattgtgctttaagagtatataattgtcacggtataagaattttctgaaatttcagaaggagtgaacattttggctacagaaaataaggctgtcattacattatttggtgcgactggtgaccttgcaaagcgtaaactttatactgctttgttcaagttatatcaaaagggttacctagctgaccattttgcattactaggaacctcccgtcgtccattgactgacgaagaattccaacaaatcgttcgtgaatctattagcaatattccagaaactgaggatggccaagcagaagcattctcaaaacactttttctacaagtcacatgatgttactaaaccagaacattacgaaatccttaagcaacgccttgccgaattagatgaacaatttggcgctgaaggcaaccgtctcttctacatgtcaatggcaccacaattcttcggtactattgcattgaacttgaagaagcaaggattattaactgacaatggctttaaccgtcttgttattgaaaagccatttggtcgtgactttgaatctgctaagaagcttaacgatgaattatcacaaacatttagtgaaaatcaaattttccggattgaccactaccttggtaaggaaatggttcaaaacattcaagcattacgttttggtaacaccatgattgaatcactctggaataatcgttacattgataacatccaagtaactttaagtgaaaagcttggtgttgaagaacgtgccggttactatgaccaatctggtgcattacgtgatatggtgcaaaaccacatcatgcaaatcgttgctcaattagcaatggaacaaccagttgcatttactgatgctgatgttcgagttgaaaaaattaaggctcttcgtagtcttcgcctctacacaccatcagaagcagctgctaactttgtccgtggacaatatgatgctggagaaggaactaacgcttaccgtcatgaagatggtgttgatccagaatctggtactgaaacctttgttgctgctaagttaatgtttgataactatcgttggtctggtgtaccattctacgttcggactggtaagaagttagcagacaagtttactcgtattgatgttgtcttcaagaagccattaatcgatatctttgctaacccacgttctgaaagtgaccaatcccttaactcaaacgtattaactatttttgttgaacctaactcaggttttgcaatccaattaaatgctaagcgcgcaggtcaaggcttcacaacagaacctgttgatttacgcttcttgcaaagtgattctgataagaaggaatctccagaaccatatgaacgtcttttccatgatgcacttgaaggtgaccacacaaactttgcctcatgggctgaaattgcttatgcatggaagttcgtcgatgttatccgtaagctttgggatattgaaaagcctcaattccctaactacactcctggttccatgggtccagcagcttctgacgaactcttggctcgtgatggacgtaagtgggtttatcgtttaaatcattagttaataaaagtaatttatagcattcttgctgtaaattatttttttataataaaaattgatatttagcgtttgcactatctttaatttttgttataatcgaggttgtgaattatattacataagtattgaggagagtgactttaatgtctgatcaaaaagcacaaattggtgttgttggtttagctgttatgggtaagaaccttgcactaaacatcgaaagtcgtggcttcacggttggtgtatacaaccgtcaccgtaaccgtactgacgatatgatgcgtgaccacagcgataagaagttagtacctagctacactgttaaggaattcgtagactcactagaaaagcctcgtcggattcttatgatggttaaggccggtaagccaactgatgctcttatcgacgaattattgccattacttgacaagggtgatgttttaatcgatggtggtaacactaacttccacgatactatggctcgtaacgctaagttagacaagtctggtatcaacttcatcggaatgggtgtttccggtggtgaattaggtgcccttcacggtccttcacttatgccaggtggtcaaaaagaagcttatgacttagttgctccaatccttactaagattgctgctaaggctgaagaagatggcaagccatgtgttgcttacattggaccaaatggtgctggtcactatgttaagatggttcacaacggtatcgaatacggtgatgaagaattaatcgacgaaagttacaacatcatgcgtaacgtattaaagatgcctgttgatgacattgctaagacctttgctgaatggaacaagggtgaattaagcagttaccttgttgatattactgctgatatccttactcgtaaggatgaccttggtgacgacaagaacaagcctattgttgacatgatccttgaccgtggtgctaacaagggtactggtaagtggagttcaatgactgcccttgatggtggtgctcctcaatcagttattacagaagctgtttacgctcgttacatttcaatgatgaaggacgaacgtgtacaagcaagcaaggaattgcctgttgaaactgaagctatttcaatcgacgacaagaaggaaatgattgaaaaggtacgtcaagctctttacttcggtaagcttatgagttacgcacaaggtttcgaacaaatgcggatcgactccgaacgttacgactggaaccttaagtatggtgaattggctcaaatttggcgtgcaggatgcattattcgtgcacaattcttacaaaacattactgatgccttcactaagaacccagacttgaagaacttgcttcttgatgattacttcaaggatattgctaagaagtaccaaaaggcaactcgtgacgttgttactcttgctgttaaggctggtattcctgttccttcacttagtgctgctatcagttactacgactcataccgttcagaagtgcttcctgctaacttgcttcaagctcaacgtgattacttcggtgctcacacttacgaacgtactgaccgtcctggtaacttccactacagctggtacgaagaacaataatcaaataaattttgatttaacgactgagatctattctcggtcgttttttattttaaatttcttaacaagaaaatagaaacgtggtttgattagcatagaggtgagtataatgaataaaacatttatgagcggctattaccaaggtgtcatcgaaacagcccctactactctttcggctgctaaaacagaacagttagcaattacgatgacaatcctccatttacgtcatgctggaataaacattacatcaatccatgattttcttgtcaacgatcttcatgcaaatgaacgccttgtaaataagtatattaatttaaatgctgatgggttagaaactattcaggcccaagttatagcaatcgctttcaaccaataattattttgatattacttcctttttcgtaaaactttactaaaattgcattgactttttctatgaaaacgcttaccattattcgtgtaagatattattatatgttgttgtagaaaaggggagttaacatgaatacaaaaatcgatactgcaaaaagtaaacagcatgttgcccgttcccgttttgcctattcaatgggagccttcgggcatgatgtcttttatgctttactttcaacgtatttcattatgtatgttactggacacttattcaattctagtaacaaagcattcaacaatcacatggttctatgggttacatcaattatcgctgtattacgaattgtggagttgttagttgacccattaattggaaacgcaattgatcgtactaacacacgttggggtaaatttaagccgtgggttgtcggtggtggaatcatttcagcaattattttagccatcttattcaccccaatgggcggtttaagtctttctaatccttacctatacctattgatctttgctattttatatatcattatggatatcttctattcatttaatgatgttgccttttggtcaatgattcctgcgctatcatttgattcacatgaacgtgataaaatagctacttttgcgcgggttggttctactgttggaggaaatattgttggttttgttattatgccaatggttttattcttctcagcaaatcaaaatggcggtaccggtgatgatcgtggttggtttatttttgctgcaattgccgctgctgttgctgctattactgctgttggtgtcgggcttggtactcatgaagaaaagtcattgcttcgtgaaaacaaagaacaaactaaactaaaagacgtttataaaattcttgtcaaaaatgaccaattattcgctatagctctctcatatctattctatacaacaggaatcacattagttaacagtatggagctttactactttacttatattttaggtgattcaaaggctttctctattctaggtggattaaacactgttattggtgttatttcagttcttactttccctctctttactggtaaaattagtcggcgtaaattattttacgggtcagtttcagtacttttccttggcttattaatctttgcatttgctggtaaatcactcattttagttttagttggtgcagaattattcttcattccacaaccattagtatttttagttgttttaatgactattactgattctgttgaatatggtcaattaaaattaggacaccgtgacgaatcacttacattatcagttcgtccactgctagataagttcgctggtgctgtttctggatggattattggaccaactactattattgctggaatgactgctggtgccactgcagcaacagttactgctgcaggtgctgctaagtttaagctagtaatgttcctagcccctgctatcttgatcctcattagtgtatttatctttgcaaaaaaggttaaacttgatgaaaagatgcacgccaagatcgttgctgaacttgaaaagacttggggagatcaccttgaagatgctgacagcgacaaccctcaaacagtatctgtttctaccccacaacctggcgttactgatattacatcaccagttgccggtacacttgttaacttaaaagacgttaacgatgaaaactttgcttctgggaacatgggtaaaggattcgctataaaaccatctgatggtaaagtaattgctccatttagcggaacagtacgagcaactttctctactcgtcacgcaatcgggcttgaatctgacaatggtattatgttactgatccacgttggtattgatactgttaagcttcgtggtactggattcattagttactttgataaggatcaacactttaacaaaggtgacgaattaatggaattctgggacccggcaatcaagaaagctggccttgatgatactgtcatggtaacagttactaacagtaaagacttcgatattaaattattgaaagatgctggtgaaaaggtaactactattgatatcgtcatggaagttactaaaaagtaattaaatatcttctctgttaaaaaagaggctggaaaaataatccaacctctttaccattttaaagtataaactgccagaacgcagtagctggctggattctgaacgttgataaatcaacgtccagaacacctagccatccttgcgggggggtgggactaaactcgcaagcgagtttagtcccactcctttttaatctacatattttattctaaatcttgttaatgttacggcattaatcaacgttacagcagtcataataataaccacaggcgtaaacgctgaataaaaccaggaaattccaaaaccggcaattgttgaaacattgaactactcccacttagctaaacctacggtttaatgcttgaagtgggagattctggaaacatcgcatacttaccctaccgattctgaacgaaccttcaagcagaggttacgactattagccaaggctcgtcccgagcctaactttatctatcggatagctaatcctttttgcaagatgacttgtgcagcgttaatatcacgatctaaatgtttaccacagtttggacaatcccactcacgtaccgctaaccattccgatttattcaatcctaaccgatgattattcttcccacaattagcacaaatttggctagtatatgacggattgacctgaataagctttttaccgtaccagtcacacttatattgcaacatatctactaattttgaccagctagcgttagcgattgctctagctaaatggtgattcttcatcattcccttagtattaagtttttccaacacaatgatgtcgtactttttgaccaatttagtagtgaatttttgtagctgatccaaccgttggttggcaatcttttgtcgatacttcgccaccataatacgagctttctgataattcttaaaatcatctaattgtcgtggaactaacactttattatgatgatcccaggcgatttcctgctgagcctttaagaaccgacgactacgtaatttctcccaacgatacaactttttatggtatttgtcttcaaaatgattgatcggttccttgcatccatctgaaagattaagtaatgacttaagtcctaaatcgccaccaatatatttacttgttttaggaagagtttggttttcgctttccactaaaacaataatgtaatattgaccagcaacgttcagacgaacagtgacattcttaattttacccattggcaatcgaccagctctaaaatagacgataccgagttttggtaactttatatgatggcaatctaaaactttaatattgccattaacgtactttgaattgtagctctgagaatattttttggatttaaattgagggaatttattttgacctttaaaaaagcgttgaaaagcatcggctaaattgcgattagcactttgcaaagcagttgattctgcttgtttcaaccaaggatactcaaccttaagttgtttcaacagattattcatcccaaaggcattcacaaatttagcttccggattattcttgcgccgttcaatttgcatattaagcatttgattccatacaaaacgaacacaaccgaaggtttgccagagctgatttcgttgtgctgaatttggatagatgcgcattttaacggcttttagaaccattattttctcccttgactttcaatatatcgttttacaacttctaaaggcgctccaccagtgctaattaagcaatagctttgtgtccaaaaggctgatttccaaagatattgcttgatttctggaaattgttttttgaccattctggagctagacgatttgtaagcatttaaaaatttagccatttccgtatgaggcgttgctctaaacaaaacatgtacgtggtcctgatcataattccattcttgcaaattgatgccgtacgcttgtcccacaactacaaaacgatgtttaagatattcagatatttcatcgttaattacttttcgacgatacttaaccaccattaccaaatgataattaagtaagtatactgaatgctgatttctatctaattctattgttatcaccccattttatagatatatactaaatatatcatagaacaaaagaaaaagcactaacgtactttaagagagcgattcatcccctacttatagaagtggggtattctcgcaaatttatggataaaaatacttacaacggttttatttacttttaccttattgtaatagttagcaattgcaaggccaatataaagcaaggcaaaacccaggtacatgcaggttcccgcaaatcgcggatgtgcctctgcatcatcaatgaatttcattgccacagttattaggctaagaccaaataaaataaagtaatgaagatagatcattaaatttcctgtctcatggcgttgatgttcattaattaaatgatcaaattcaacaatgtaggtaaagaatagcgctgcaactgtggtaagtataagaatagactgaattgaaaagctggtggcagtaaagtaatcagcaataccgacaatcgtctcaccaaacatcacgataattaatgccgtaagccgttctagcaagtgcgaaaagatgataggatgatgctttgtatattttccggtaaagccaggcgcaatccaactgataataataccagcaaaagcaatcctcactctaactcggctttgataaaaaatcccaccaataaaaagcgtaacggtcctaaaaattaaaattccagcaaatgctcgtgtaatctgtttatctatcttcttttctgcctaaaagtaaactaaaacatattggatacataacgttaatgatagcaatcctgcagctatgaaaaaaattgctaaatgccagtcaaatgttgttgaaaacgaatttgacatatagagaagaattgccatatcgacgaacgaaaagataacatttgttcctgaaatctttccatgccgatttgtaaaaaccatctggaccatccaggaattaataaatacaatcacgacaattgcaaagattcctaaaaccggcaatcccacaatcccattgtgcaaatggtgaatcatttctgttgctcggaaaaccatgtaaacgaacactaaatcgtaaaataattctatcaaggaaactcgcttagtaatttcatctgccacgataacacactttcttttttataaaaaaagagttaatggtaatatttaccactaaccctcattgataatattcaatgactatttaacctgatctacatcagttcggacaactaacacatcaacaggcgcattacgctttacatatgacgtaactgaacccattacagctcgttgcatccgtgataatccactagcaccaataataatcatgtcgttgtggtgatcacgagggaagtcaaatgaaataattgtctttggattaccaagacggatatgaatgtcaagattgtcaaaaccatccttatccttggcagtcttcaacaattcatcaaggtattgctttgacttatcaactaactggtaagcaatacttccatctgacataccagcaaagttataagccattgctcgtgtatcaattacgtttaaaatatctatatgggcaccattacgctttgcaattgcgattgcacgatgcaatgcaaattctgattcctgagagccatcaactggaactaggatgttttgatattcttgatccataggtttgaacctccaaacaaacaagtaatatatttacttaaattataccatttttttaaagaataaagcgaaggaaaccagaataatactgacctcagataaaattccaaatttcctaaaatttagactatacattaatctttaattagagtaatcttaatatatccaatatacctttaatatttgaaagtgaggccgcatcttatggacaagatcgataggaagattattaaccttcttcaaaaaaacgcccgtgcttctttaaaagaactctctaaagaatgttttatttcatcaccagcaattgcggcgcgaattaataaacttgaacgaaatgggattattactggctaccatacaagtgttaacatggaaaaaatcaactttcatgttaaagcttttattcaggtgcaacttgagcctcgccaaaaacaagaattttacccttacattcaacaaattcccaatgtgattgaatgtaactgtgtaactggtgattattcagaaattatggaagttgtttttccttctaccaccgatttagataacttcatcaataatattcaacaacgttttggaaagacaagtacacaaatcgtatttagtacaagcgttgaccaccgaggagttaagctagcaccagcccaagataccgttagttcagaaaaagagtaaacataaaagcgaaggtgaggatttccccatcttcgcttttatgtttatttaattttattcagcttcaacgtcagtttctgttgatggtttttcctttccgtaattatctaaatatgcattatatttttcacggtcaagagtaccttcagattcaccgataacaagtgtggcaattgaattaccaaccacgtttacggcagttcgtcccatatcaacgaaacgatcaattccggcaatgaaagtcaaaccagccattggaaccccaattgtagaaacactagcaagcaatacaacaaaagaagctcctggaaccccagccattcctttactagtaatcatcaaaacaaccagcagagtaatttggtgagaaatactaagatgaagtccatatgcttgtgctaagaagatcgctgctaatgattgataaattgcagatccatcaagattaaaagtataaccagttggaataacaaaagctgtaatacccttgcttactcccatctcgtgcgtctttttcatcaaacgaggcaacgtaacttctgaactggcagtagtaaatgccaaaacaatctcatcaaggatagcgcgcatcgtcttccaataacgtaaatgaaaaatatgagcagtaataccgaggacaacaataataaagattaacattgtcacatacgcaatcacaataaataatcctaatggcagcagagcactaatacccatttcggcgattgtcattccaattaaaccaaagaccccaattggtgcaaacttcataacccaattagtaactttgaacataacttctgaaactgcatttaatacatcaattaaaattttagccttttccccaacagctgcaattcctaatccgaaaagaactgagaacaggataacaggcatcatgtcaccatcagacatggatttaaaaatgttcgttggaataatcgacaaaattaatggccagaatccgctactatgttctgcagattttgcagtggacatgtattgcgaaatatcagttgcatgaagtttatgaatatcaataaacgaacctggatgggtaatgttagccattacgatccctaaaattaacgcaattgtggttaaaacttcaaaataaattaatgtttttccaccaatccgtcctaactttctaatatcaccaatattagcaattcccacagtcaagcaagaaacaacaattggcattacgatcatttgaatcagccggataaagattgtccctaagctctgcataacagtgatggcacccttattttgatagaaaattaatccacaaataataccaagggccagcccaatcataatttgccagcccatactgaggcgtccgaaacgatatcgcttcactttatatcaatctcccttatgtagtcttattatactttagcacatttttagtaagattttagcaatttttaagattttatttaattaaatccgaacactttttgctctttctaggtattttattcacttcaatataataattctaatttataattcgtaattttcactaaagaaaaataagaccgctactaagtatttctctaatatgatagagtgtttagagaatatttaattgaacaggagtaatttatgaacgcttggataacggaatttattaatcagtttggttattttgcaattgccttactaattgcccttgaaaatgtctttccaccgctaccatccgaaattatccttacaatgagcggattcatgacgaccaccacctctttatcaattgttggagtaattatcgccgcgacaattggctcacttatcggggcacttattttatatgctctcggccgccagttaactgttaaccgccttgaactccttcttagtcatcgtttatttaaacttctaggctttcatcaagatgatgctaaaaaagcagtcgattggtttaataaacatgggacaggcggcattctctatggccgctgcattcccgttatccgcagtttaatctctattcctgcagggatcgcgcaaacttcattaggaaaattttgccttctcactactatcgggagcaccatctggaacacactgcttgttgttcttggcgcttgggtcggccaatcatggaataaaattgtcattatcttcaacgattacacgactgttgctattatcattatggcgatcgttggtttatactttgcttatcggtggtatcaaaaaagaattaagaaataaaatgattcagtttcaattagtaaaagcaataacgccattactatcaaaactgaatcatttttcatatgctatcgggttgtttgccgtttgatcaagtgagttccgacaactgtcttgcatgggtcattattcggattttgcagccgtttaatcatcatatcaactgcggcatgtgccatttcatcagtggcaatgtgtactgctgacatacttggataaacgtacttaacgattgccgtatcgttaaaactaatcaaggcgattcgatttggaacgttaattttggcttcttgaatcgctttaagcgcgccaactgccatcggatcatttgctacaaagattccatgcggcatacggtcaccaagcgtcgcaattgcctttttcatcgcgttatatcctgacatcgaggtgtagtcgccagcaaatataaattctggatgataaaggttttgttgacgtaagttactttcaaaatagaatcgccgcaaatcaggaacaatttgttgatccgttgtcttttcagttcctgccaacataccaatatcgttaattccttcgctaacaaattctgaaataactgaccgcactgcattttcaaagtccggtactaagcaatcgtaaccggcagccaaactatcgtaatcaacaaacacaatattagaagttactaaccgcaatgcttgaacttgcgaatcactaaattttccaatcgcgatgatgcccgtaacatcacgaggaatctcttccatattgttttggtaaacgggaacagtctgtagtccctgttgttgcgctgctcgttcgattcccatccgaattgccatgtaatacaggtcatctaattcttgtgtaagagaataccattgaacaacagctactcgttgtacttggttattacgtgctcgcttatgcttagtatagttaaactcttcggcagtggctaacactcgctgacgtgtcttttcatttacagaaagtgtcacatcattatttaaaattcgcgatacagtcgcaatagatacccctgctttatccgcgatatcatgtaatgttactgccatactgcttcagcgcccctttcttcattttaggttaaaactattttaaagcatcaacgaatcgttgccaaccttcatttccagctgtgtcatccttaaagactcccgcattttccaaaacattggcaaagacattagcaagttcttgttccataacctcatcgacattatcctcggtgatattaatccttgactgaacttcttttgcccatagaagatgactatctgcaatcttattttcagcaccaagccaaaacttcttgacttcatttaactcatccttaagccgcgctggtaaaatagcacgacccatcacttcaatcaaaccgatattttcctttttaatgtgccatagcttttcatgtggatggaagattccgagtggatattcatcattagtattattatcccgcaaaactaaatcaagaacaaacttatcgccttcccgatgcataattggggtaacagtatgatgacgaagttcaccatcaaaagccttaatatcaagactttcatcactgtattgatcccataccttaataatatgtgtgccaagatcaattagttgctcagtatcggtactagttaaacgaatatcactcattggccagttaacgattcctgcattaacagctggatattcatcaaagtacaattctttcttaatagaggctttcatcattgggaaaatatgcttaccaccttggtagtgttcatgagcaagcattgatccaccaacgattggtaaatccgcattgcttccaacgaaataagctgggaattgcttttcaatttcaactaagttaattaaagtttgccgattaatctccattggctcatgcttactatcaaggaagatacagtgttcgtggaagtaagcatatggagaatactggaatccccattgttgcccccctactgtaattcgaataatacggtggttgcttcgtgctgcctgtccaagacgtcccttgtaaccctcattttccatgcaaagagcacattgtgggtacttcttagcggtatcatgagcagccgctgcaattgctttgggatccttttctggctttgaaagattgatggtaatttcaagattgccgtacttagttggtttatcaaagacaacattcttcttgatagcagctgctttaacatagtcgttgctagtacataagttatagaaccaatcagtcgcacttgatggagattgttggtacttttcccagaatttatgattaactactgatggcgttggggtcatcaaatcataaagctgatcgtttaaaatttccttagcagtttgaccatcatcaattttcccgcgtttaacagctaaatcaacaagttgactaacaacagattcatcatctttagcttcaacatcttcatcatcaacaaagccccgaatcttgtttaagacatagatccggtcgagtggttcataagttccactagcaatcacttggtcagcaaacttttccattaacttcattttctcattcccccactaaaatactattaaagcttatgtggtccatcaacaacttcagcatcatagaaactggcatcgtaaccaatcttgtcccggtagatctttccaacattctttttgaagttttctgcttctgacttcttaacaatggcaatcgcactgccggcaaatccaccgccgaccattcgagcaccaaggcagcctggttgaccccatgcattttctgctaaggtatcaagttctttaccagtcacttcataatcatatttaagtgatacatgagaggcattgatcagacggcctaattcttcaagatcgcccttttccattgcatcaatggctttctttgtccgttcattttcactaactgcatgacgggcacgacgaatcagcgtgtcatcatcaattaagtaggtgtattgatcaaatgtatcggagtctagttcaccaagtttgttaatattaagcttcttgttaagacgtttaactgcttcttcacattcttggacccgttcgttgtatttggaaccagctaaggagtggttcttattagtactcatgataatgatttcataatcgccaagttcaagtggcaaatacttatattcaagagtgttgcagtcaagataaattgcgttattttctttacccattccgacagcaaattggtccatgattccggaattaagaccaacgaaatcattttcagtcttttggccaagtttaactaattcaatttcatcaatatcaagattaaattcatccttcaagatatttcccatcaacatttcaattgatgctgatgatgataagcctgaaccataaggaagaaaaccgtggatgtataaattaaatccgtgatcaatcttgaagccccgttgctttagataaaccagcatccccttaaagtagttaacccacttttcatctttagcactttgcggttctgtatcattaatgtcaaaagtaataatcttactgtcttcttcttttgctgaattagctgagtaaatggcgactgttgtgtcctcacgcggtccatataccccataggtcccaatactgattgcacatggaaaaacatgaccaccattataatcagtatgttccccgatcacattaatccgtcctggtgagaaaaatacatccttccccggttccttaaatacatcttggtattcagctaaaaattgttgcttatccatcagaataacctccatacatcaaacaaacattagtaaacttttactaaatataatttactactttttaaccatctcgtcaataagcgcttacaaataattcaacacacctaagaaaacggttacaaaggataagggatgatatacataatttcttctttaatgctacactagtcataaataattggaggatttaaatgaagaactaccaaccaactgatctaattaaatttgcttcacgtactggacgctggaccgttaaaaagattaataatatgcccaccttatacaccactaaccttggaagctaccttcgttttaaggtttcaaatgctaaaaaatgtcaaattactgttttgccaaatcaaaattccctatctcctagccaagtgtttgcatttcgaattgatggcggaaagtggcaacgggcacaagctagcttagaaaaatttgatattccacttgattcgatattacataccatcgaaataatggcagccggtaattccgacattgacgaagtgtggaaaggtaatgaaggctttgcaattaaaaacatttatcttgataacggcgcaattatggcagccccgcagcgtcctgtggtcaactttatcggtgattcaattacggccggttgttgggtagttggcaatcatcctgctgctgactaccgaccagaaactaactatgcgggaatttgtgcagatctgcttaatgtcgatagtgttcgaatagcctactctgctgggggagtgttaagacctgctactggcggggtcccaactgccgatgtctttttaggaaaaattgacaatcagacattatggacgcctaatcaccctgatctcaacgtgattaatttaggcgttaatgaccgtcgtttccctctaactcaatttattgccgctttcgatctttttatccagcaagttaagctaacttttcctcatgctcccttagcaatcatgattccttttagtcagacctttgcttctgcgatccgcacaattgccactaaacataactgttcgataattgaaactaaaacttggcaccatagctttactgatgggctccatcctgaccaagcgggcgctattactgaaggaaaaatgcttgcacaagctttacaacctcttttatctcaattcagtgtacaatagtagtaagagttaatacgaggaggattctcatggctaaccaacgcttacttccaataaagaatgggtacaactttcgtgatcttggaggttatcccacagcagatggtcatcaaataaaatggcatcgtcttattcggactggttcacttgctcatttagatcaaaatgatctcaccgttttagataatattcctatttcgctcgatattgacctccgtgctcccgacgaagtaaagaaagatcctgatcgagtgccttcccaagcaaaatattatcatttacctgttttcgaagccgacgaaacagacgcctcgcatagtgatgaggaaatcgccgcacagatgcaacagccaggaaacggttatcaccatatgattgatgtttatcaccgaatgaccacggctgcttcagctaagcaggcttaccagaaattatttaatctcttattgaataatgaacgcggtgccttgctatttcattgtactgctggtaaagatcggacaggaatggctgcttatctcatcctcagtgcccttggcgttgagcaaaagattattatggaagattacctgctaacgaatactgttactcaggattttcgtaatcactggctgcaagatatgcggaatcatggagccagcgaggcactagtgacaaatcgggctgcccttgcctcagtagctcctgattacttaaatacagcaatcaaaaatattatccagacttatggaaatattaatcagtatctcaacaactaccttgatattactcctaccgaaataaaagatttacgaaaattgtatttagattaggctcgattataattgtcttataaggaggaatttttatgcaaatctcagtaccattagttaatgggatgttagcagatgaatatggtaaatatgcgccagcagctgatatgctagctgaccatccaattaagtcatttccaattaaaattaccgacgcaccagcagatacaaagacatttgcactcgtctttatcgattatgactcaacccctgtctgtggcttcacttggatccactggttagccgccaacattccagcaacgttaacagatatccctgcaaatgctagtcgagaattagcggataaatttgtgcaggggaataatagcaatgccggctcgttggttaatggaaacccattgattactagtggttatgtgggtccacaacctcccgacaaaactcatgattatactttaatggtgtttgcgttagacgatactctacccttagaaaataaatactggctcaatgacttcatccacgcagccaaggatcatattctagcaaaagcacaaattgatttgccaagtcgtgcatgaggaggaacttatagaggaggaacttataatggaaacaagaattttctttaatccaggcgattcagtcgctaatattcatgactataatgaagctgttcgaaagggacaaatttttaaacaagcacgtcacaatgacgaacttgtcatcgccaaagatcctaacgataaagaatacgcaattttttacgctaaggatgccttaccagctgagcacgaaaaatcaaagccctacgaaattaaaaatcggctttaaaatagaaaatgactcgcggaaatttccacgggtcattttctatttcgataaaaagcttaacgaccaccaacaattttggctgtcgcattttcaagccgttcaattaatgaatcagcatcgttcttaaagtcatcaacaaatgagctcgattgtggttgaatgcgtcctacttcatcacccataatatccgtaacgactaggtcatccccatcccacttcacatcatcataatgaccttcaagagcttcatcaaaaaatgcttggagtatatcccgaacagcattttgaataacagtcttttcgtcaacttgctcaccacgtacctgatgttgagccagctgcattgctacttcttccatattttctggaatttcaacgctcattgtggattcctcctcttaaaaaattaatggcgacgtaatttccgccgagcctttttactaaacttgattccttgaagggacttctttttccgctttaattgtgaatcaattttgttatcgctactcttagccacttgttgcttttgttgcatttcgcgttgacgcttgagcaggcgtttacgttcatattcgccccatggattcaagaggccacgcataaagtcagcaacttcctgcttatgttcgtccatccacgcttctgctacatctgcatcatcagtatcgataccattactattgatgaatgataaaactaattgagtttcacgctcatcacgatttaatgaggcaagcatgtcttctgatggttgcatattagcaattgcctttaagcccaacttgtattgatccatgttgatgtaatcattttgcttcaagtattcaaacaaggcctgcgcgctcggtacgatgttgtgaatttgcttaattgaaatatgtggatctaatggcatcatcatgcccaatacgcgttgcaagttgctgaaagtccattgacctggatattcattgcattcttgtaccattaattccaagaactcttgcacaacatagttcaactcaacatcatctaattcaagattattgaattgggaagcagacttaatagcttgttgcacatttgctaataagtccttgaacttctcaggtgtccatgtaatttcttttttagcaggacttgcttgaaccgaggttgcttctgcttcgtcattttccgcatccccatgtaattgggcccatgtcttatgtgctttccgacactcgttcatctttgtccgttgttcttccattgcttttacaacttccgcaagattttcaactttcaaaaattcttgataagctcgcaaaactggaacaaccgcaattccaaattgattagttagtgctggatcagcgatgaattccccgaccatgaccgcttttactgcttctggtgtccaagtagtatcggtcaaatgctgatcatttgccatctggttattaaaacgcgtcaaaatatcctgtgcatgcttttgctgattagcagataactgatgatagttggacgaagtaagaaactggtcaatatgttgttcttgttcgttcattatctatatatcctccgtctccaaattgaattttcctttctatcatatcataattatatctagtaaatataacaagattgctaatatacaaggagaaactataccaatgcaacgaaaaaagatccaagaagcaatgaaaaatgtctattttcaaaaaatgactgcaaatggctatcatgaaattgaagaacaaattgcaaaattacaacagcaaagacctgcaaaaattggacaattaaaagcagcccgtgcgcttggtgacttatccgaaaatacagaatatagtactgctaagcgtgaattacgccaccttgagagcaggcttcggtacctcaataaacagcttcaatatgctgaaattgtgacccccaagaatgatcacactattgatttagggacaaccgtgataattgaatttgaggatgaccatgaacaagaaacttatcatattgtgggaaagcaggaagctgatcttgccaaacaaaaaatctcctttgattctccccttggtcaagcccttcttcacaaaacagctgggaccactgtaactgttgaagcgccgcaatcttcatataaagttaaaattgttaaaattgaattatagtattgataagtcattcgatatttcgtaatccgctaaaggaaatttttaaatttattattttcaacgatagggttaattttccgcccttcaattaatctaagcgactgattaaataaacttttgggtattgcatccctgattttgacccggtatactattaaacgttgcttttttacatccacaatatcttgtggttactagccggcagtaaccacaaaattgcacaacatatagtagagggagttagattaatgattagcgattattttaaatttcttgcccaccaattaaagggctggccacaacaaaattattacctattctttttcagtcttggctgtcaggtaatgactttagttagtgctccaataacgcgggtaactgtcattacatttattggaaccacgcttggagtactttgcgttttagcaattaatgctgctaagtcggtaaatggtttcttaggtattttatcggcattatgtttcatcattgctggttttagtgctaaaaattatttaagtattgccgaacaaatcgcctatgttattaccctcgatttaccagtattactttccgcaaattggaatgttaacatggcatcaaagatccgtaaattcaatgctcgttcatggacggttgccatcattgcaacaattattgtctatctcgtttctggttatttaatcggtcatcttactgacgatccacgaccatggattgatgcaatcagcttttctattagtctttccgctggtgttatttgcttcttgcgttttaacaatcaatatttctggtggcttgcatctggtcttgcacaactagtactctggtttgtttcttacaagcaaggatctgctactttagcaatggccgttaatagctcgatttaccttattaatgatgttctcgcctttaccatttcaccatggtacaacgaacgtgaacgtcaacgtctcagtaaagaagaagcagcctatgccaaagcaatgggcttagaataaatctaaaaacagcaaagagattgaaaattcagtcaatttgctgttttttgtttaatattgtttattgtattcataaactaattctggttcacgaccagtacgatgataagcatttaatgcatctatctgtgccatttcttgggcgttaagttcaaaattgtaaatatcagcgttttgggcaattctctcttcatgaactgacttgggaataaaagaaacaccattctggagatgccaccgcagtataatttgcgcagtagatttattatgagcagcagcaatatcttttaatactggttcattgagaactgctcctcgccctaatggactccaggcttgcgttactatttgatgttgacgattaaattctaatagtggtttttgtgttaatagcggatgcaactcaatttgatcaacaactggcatttcatttgcttgggttgccaaatattgaagatgaatcatttggtaattacttacaccaattgacctagtaagcccttcctttttcatttcttcaaaagctcgccaggtgtcaaaaaatgatcgttcaattggccagtgaacaagcaacaaatcaacgtaatccatttgtaatttacgtaaggattctttgacagattcaatggccttatcgtaaccttgattttcttctgccactttagttgtcacaaaaatattatcgcgcggaatggctaattgcttaaaagccgtccccacttcttgctcatttccgtataactgagccgtatcaaaaagccgatacccatcttcatatgcctttttgactgcttgattcattgtcgcttggccatctaccttataaaggccaaaaccttcttgaggcatttcatttccatcggcaagagttaataggttgtccttaatatccattgaaaatcacttcctttccttatctttaatcagtaactgaggattgtcaatatcgaaattttcctttctgaacaaactaatgtatgatgagtttaaatctatttacggggaaacaattatggctaaaatatttatcgctgaagataatcctgatattatccattccacaactcaagaattaaataaatggcaacacgatgttatcacagttaacgactggaaaaacgttgcaaatgaaattcttgctacaagcccagatctggtcttatttgatattaccctcccgacgttcgatggcttttattggattcaagaggttcgtaaacatagtcaagtgccgattatagttatttctgcggctgaaattgataccaatgtcatgcatgcagtggccgcgggggcagatgattatattatgaagccatttgcgatgacggtgcttttagctaaaattcaagctttattacggcggaataagcaaacgactgacgcagaagaaataatgtgggatcataattcattcaatccccttactaatattcttatgaacgaaaacggtactgcccagctcactccaactgaaggtgctatgctccaagttttactcagtcaccgtaataaaaccgtttctaaggagcaattacttcaatggttatggcaaggtggcaaataccttaatgagaacacccttaacgttaatattagtcggttaagaactaagctaagcacaattggtttacggcaatgtattcacacagaacgtggccttggctatcgattggtggaaaacaatgaataaacgttattttaaattattttggcgttcaatccttcttcctactattggctatctttttctcttaggtctggttgggcttttagtaattttatataatctcccaactgttttttggggcgatgtgattcgcttttctcttcccttttttatagtatggcttatcggtagtggtgcaattaaatattatcgattgcgccatttaaatatttctcagctcgataaattcactcctaccaatatgactgagggaaaacttgttgaactattgcaagatgaacaagcaaaaaacattgacacaattcgacagttacaagcaactcagcatgaacaacttgaccaccttgaattatttactcatgaaattaaaaactatttgactagtcttaatgccgcggcagaaaattcaccaactgtcgcaagtacagaagtaaaaaagaatatccaccaagctaactattatctcaatttgttgttaaatgacgaacgactagcgattaataatcatgattacaattttcaatggatcgatattgccaacttaattaataatattttgcaacaaaattctgcggtcttcattcataaacaattgattccagaattaaccggcttggacggaattaaagttctcactgatcgtaaatggttgcatttttgcattgaacaactactttcaaacgcaatcaaatactcatcccctaatagtacaattaatatttcctgggaaatgaattctttgcggatcgctgaccatggatgcggcatctcaatgaatgatcttccgcgaatctttgataatggttttaccgggaaaaacgggcaccgaacaactgctgctaccgggatgggattgtaccttgttaaaaaagttactgaatacttaaatttcaaggttagcatctcatcagttcaatcccagggaacgacagcgattctatctttcttaccagataatatcagatcatcaaactaattcttacaaaactgtaaggttctgtacacttccgtaagtaggaagttgcacagaacctttttataattaagacataatcaaaacaagttctctaccagaaaggaaaattactatgacattattaaatcttcaacacgttcaacgcgtctataatcgtaactctgccaatccagtaatggccttaaaagatattacctttaaagttgaagagggagagtatgttgcaattatgggagaatctggtgctggtaaaagtaccttattaaatataattgcaactttagaacaagctactaacggacaagcaatccttaatggccaagatctccggcagctttccaaggacgacgcagcacgatatcgacgggaacacctcggctttgttttccagcattttaacttacttgatagtctctcaaatcgcgacaacatttacttaccacttgttctagcaaaaactccggttgcaacgatggaagaacggattaagcctttaattgatcgcttacgtattaataaaattattgaccgttttccaagtgagatttctggaggacagcaacaaagaattgccattgcacgggcgttatttacccatcctgacctccttctcgctgacgaacctactggagctctagattcgaacaccagtaacgaaattcttgagctctttgatgaagttaatgctaacggtcaaacaattattatggttacgcacagtgccgcggctgctagtcatgctaagcgcacactcttcattaaggatggacgaatctatcatgaactctatcgtggtgatctttcccttaaagactaccaacaacaaattaatcagacaatgatgactttaacgaatggcggtgaataatgatgctctttctcaaactgattaattcgagttttaagcgtaatcttaaagtttacgtcccttacctcatctcaatgacaatgctagtcgctattaactatatttttaaggcagttgaaattaatcgcagtcttaaagatttaccaagtgcgacagttactaaagcattaatgcaaacaggatcaacttttattatccttgtaacacttgcgtttatgatctacgtcaatcgtttcttatggcaacagcgtcaacaagaaatgggtctttatagtatgctggggatgacgagacataacttacaagtgctaacagtcattgaaaagtgctatcttttagtaattagtctttttctcgggactttatttggtattatttttgatcgcctcgcttttcttggctttgctcatctcttgcaaattgatcatttatctcaaccttggattgaatggggcgctgtgataaatacaatcgtcatcattggcggctttttcttaattttaatggtcattgatctgatcaaactatttcagctaaatccaaacgaattataccacccccaacaaactaaaatcgcgcgtcatggtaagttctttacttttgccggacttttgggtgttgcagtccttgcctacgcctattatcttacaattacagttaaaccgcggatatctgctttaacaacattcatgactgccgtcttcttagttgtgattggaacatacctcatttttattgctggtagcatcattgtccttaaactcctgcaaaaaaacaaaggatattactatcgccctcgccactttatcgcggtttccggaatgttacaacggatggaacaaaatggtgctagtcttgcaacgatttgtttactctgtagctctgtccttgtaattttatttacatctttaactatgtatgccggcattaatgatacggttaattcttatgccccacgcgaccttacaattatcacctcgcagaaacttactgcacaacaagaatcgaccatcaattctgttgccaaaaaacaccatgctcaacttaataagcctgttacctttacaacgagcgctccgcaatacggatattgggaaaataatcgtttcatcaaccagggtaatttagagaatatgactaatcaaactaccaatacagtcattaccatgtcgacagcaacttataatcagattacggataaacatgttaaattagcagcaaataaggccttaatttattcccctgctaaagagcatcgcggtgctttacagattggtacacaaaaataccaagctactcctatctatgactttcactactatttcaatccaagtcacgcgatttattcgccaatttttataatcacaaatatgcttccggcaaacactaccacaattaacttcacaggaattaattatcacttaaatggtagtaagaaagctcatcttaactttgaaaatgaccttcaagcccagcttcacttgccaaaccaagtatattcttcccggacaaaccttcgtagtcaattgaccagtctctatggcggaatcgtctttttaggaattctcattagctttgccctaggaatcacgacaactgttgtaatttactttaaacaaattactgaaggttatgaagatcaatatcgtttcaagacgatgcaacaagttggtttaagcgagaaagaaacaaccaagagtattcatagtcaagtattgatggtctttatgttgccagtagttggtgcaataattaacctttgctttgcgatccctgcaattcggcaaattctaattcaatttaatttctataatgttcgattgatgataataattgccgtctcaattacctttatcctcctatgcctctactttgctatttacggacttactaccaggatgtatcgtaaaatcgttgagcaaggttaagtactacaaattgacatttcttattttaacagttacactttaattactataaataagtacgaccgataaaataaggagatgtcgttcatgattcttattaacaccaccattatagaaaaaattacaagctgttgctaaactactcacgacagattagactgcccttatttaggcgtggttaatctacggtattgcttagtgacagtttttaatttggtttagattatatcgaggtggtttcatgacggcagatccattaagaataggaattcttaacttaatgcatgacaaagtagatactcaactgcgatttacaaaagtactttctgagggatcctacaatgttgatgtacaatacttttaccctcaaacacactatacttctcgccctgtccctgacattgttcaagagatttcccagcctttagattttaaacaagttgccacaatagatgcttttattatcactggcgcgccaatcgaacaactcacatttgaagaaattatatatcttgatgagattcatcaattgattgacgtattagttgccaataacattccacaactttacatttgctggggcgcgatggcagctgctaactatctttatgatattccaaaatttcaattacctgaaaaaatttttggagtcttccacaattatttgcgcgcgcaagaccctctcttaaaaggattacctgatggctttcttgctccccatgctcgttatgccgaacttgatattgacaagattatgaaagatccacgattagttattaatgctgtgaccaaaaataatttcttattctcgttccgcgctcgagaaaagaatcaatactttcttttctcccatcttgaatacggaaaggatgcccttttaaaggaatacttacgagagcggaatgctaatcccggtgttgagtatatcaagccgcaaaactactttcgcgatccgcttcatatgaaagatcctgaatttagctgggcaactacccaacgagtattctttgataattggcttcattcagttgcggatcacatagctacacaacaatttgtaaaggagtaattaatatgacaaaaatcactaattcaatcgtaaatttaatcggtaatactccgattgttaagttaaatcgcgttgttcctgaagatgcagcagacgtttatgtaaaacttgaattctttaatcctggtggttcaattaaggatcggattgcccttgccatgattgaagaagctgaaaaagctggtaaattacaagcaggtggcactattgttgaaccaacctctggaaacactggtgttggcctagccatggttgccgctgccaagggataccatcttgtcatcaccatgccagaaacaatgagtgttgaacgtcggaaactcatgcaaggttatggagccgaacttattcttactcccggtgccgacggaatgaagggtgcaattgcaaaagcagaagaactagttaaagaaaaaggctactttatgccaatgcaatttgataatccagcaaatccagcaattcatgaagaaactacaggaaaagaaattcttgaagcatttggcgatgatattcctgacgcctttgttgctggtgttggtactggaggaacacttaccggggtgggtcatgcattgaaaaaagctaatcctaatgtccaaatttatgctcttgaaccagcagaatctccagtattaaaagaaggaaaaggtggcaagcacaaaattcaagggatcagtgctggctttatcccgaaagttcttgatactgatgtttacaacggaatccttgaaattaagagcgatgacgctattacgatggcacgtgaagttggtcatcaagaaggaattcttgttggtatctcagctggtgctaatatcaaaggtgcgattgaagtcgccaaaaagcttggtaagggtaagcaagttattactgttgctcccgatggcggtgaccgttacctttcaacagaattgtttaattactaaaaatttaaaaaggaaagagactaagatatttttaatctaatctctttcctttttcccattgaccgcgaccttacgtcattagctacacttgatagtatgaaaggagtggtcaatatgtatacgactggtcaattagcaaaaaaatgtaatgtttcaatcaggacaatccaatactatgaccgccgtgggttgcttcatgctaaacgaactgaaaacggattgcgccattataattatcaagaccttaaacaacttcaagaagggactgtgacataagttaagttactttcataaaaagcaaatacgcagtacaacaatggcctctaacgtccggtaaaaccgaacgttaaaggcttattgttgcttgcgggggctcgaaaacgaagtcacaagtgacttttgtctcgctctcagcttaaaagacattcaacagattattaatgacactgacaacaatattctaaaaagcctaattgttaaccaacgaagaaaactcaagcaggaaattaaagacgcttcagaacaattagcaagtctatctcaattagaaacttttttgaataaacattctgatttcccaggaaatatcagtcaaagtgtttttgacaagatcaagaaaacaaagaagttaaaacagttacgaattaaattattgcttattggtatcagcatcgacttcattctttggggtagcattctttactttcttttttatcaaggaaatttgatatggttattattaggaattcttattacagttgctttaacttggtatattgctataaattattaccatcatacttgctatatttgtcctcattgttttcataagtttagggtgtcgcttagtaaatggctttttgcccgtcatactcctaatacaagatatcttatctgtgacaagtgttcacaaaaaaattattgtattgaagaatattattaacaaaaatgaccaaggcgcacaattgctaaaccttggtcatttttttgcattttatagtattggtgaaagcaagcgagaaaagtattgcttgaatttccgccactttgactgattagcaaaatactcaggagtaagtaacgtactctttttcatgtcactttcaaagtcttgctttaactgcgctgttagtttttcattatacgcaaatgcattgacttcaaaattaagtctaaaactacggtaatccatatttgccgaaccaacagaagcaatgttgctcccactaaccatcgtctttgaatgaataaagccattatcgtacttgtaaacttttaccccgttgttcactaagtatttagcataatattccgttgcccgataaacaaatggatgatcaggcatgcatgggatcataattcggacgtcaattccacttcttgcggcaattactaatgcttccagcactgaatcttctggaataaggtatggcgattgaatatagacgtattttcgggccgaactaataattgattcatatccccgtcgaattgaataattttcattatccggtccagaagatacgatttgcattggaacctcatctggatcgccatctggtgcaaccagttcaaaattcttaaattctttttcaaggtcaattttctttttatgagtttttcgacaggttgtattccagtccatcgcaaaccgcactgtcatcatcatcgttgcttgtccgacgacacgaaggtgggtatcacgccaatagccaaacttaggatcttcgccaaggtattgatcaccgatattgaatccaccaatgtaaccaatcttgccatcgataatagctagtttacggtgaagatgataatttaaccgtggcgtttgaaaataagctttggcagcagcaataaacgcttgcgcttctccacctaattcttctaaatgcttaaaaaatttgaaagtagttccatgagacccacttaaatcatagagaacacggacttttactcctcgtgcagctgcatcttctaaggctgccaacacccgcttccctagattatcagcataaaaggaatagtattcaatatatacatgatcagttgcatgatttatatcgtcaattaacttatcaaacttctttttcccatcaataaatacgtgaactttattattaaaggttactactgaatcattcaaactcaaaaaaaggttaaccaactgacgatcacgcgacaaccggcttccttttggcattaattcatgttcttcacttaattttcgttgtttttcaagatatttagtccgtaattgtttttgctcatcttgaatactaaatatctcatcatgggataattgtcgtcccacaaaaagatataggataaatccaactactggcaaaatagttaagactaatagccatgcccaagttgatgcaatatcccgacgactacgaaaaacagtccatactgcaaaagcaatgttaatcaaccataggacttcaataatgcggcgaataacatcccatgtccaaacaatatccataatttaataatctccctagttgtattactgattcattatagccattatttgcttacttttcagcaggttcagagattattttcggtaaaaacgacgaagggcaaaagataacccgatcgctaaaagtccgtacactgcacctacatagccaagcatcgttaaattagcaaagttaacagtagtagaagccgtaaaggatccaagtgaaatcccaacattagcaaaaattgaaattaatgatgttgctaaagctaatgactgcggatattctttttctgccacactaataaataccagttggatagttgttccatatataattacaacgacacaaagagttgctagaacaagcattcctgtaatcttatttcccaatgcaatcccaagaataagacttaatattgtcatgagaataaagacaaatggtaatttttgaaccccattgtgactcgcaacgattccagcaatttcgttaccaataatactcattacccctaaaagaagcagcagccaatttaaactagttaagctaaagtccatcacagtagtaattagcggccggacataagtatagaaagtatactggagacttaagaccgccaccgtgattccaatccctaataaaacacggtgatcttttaatagcgctaattgttctaaaatgctccctttaatttgatgtgtatcacgaggagtaagccagactaacaacgcaaacacaattaatgttaatcctgaaatgatccaaaaactatcgtgccaggaaagtaatgttgcgatggttgtaccaagcggaaccccaatgaccgacgcaatactaaaacctgcaccgacccacgctagaaccattggccgcttgtccattggtgtaattatactaactagcaagttaattaatgaaataatggttccagcaacagcggcagtaataattcgcgcaaataggagccagccaagtgttggtgccatcgcagttaaagtattaccaataaaaaagacggtcattaatagcataagaagattatagcgattccaattgctagttaaggtagtaataattggcgtactaatcgcatagactcctgcaaaagctgtcaccaaaaaaccaactgtggaaagtggaacatgataactccgtgcaatatctgataaaacgcccacaaccataaactcattacatcccagcataaatgcaacaagaataaaagtgaacgatcgcaatttagcgtgcttcacaataaacctccttttaaaacaaaaaattttctggaaaaagtcaatccagaaaattataaacgtttaacaattaatttccaatagttttgaactatttagtttaataaggttgtgagtgataagcagtaaaggttttatcatcaaagcaaaccatcgttacttgatcaacataattggcattagggagaaaatctttaatcgtcctaatcgcaatttttactgccttttcaagcgggaaagcatatacccctgtactgattgaaggaaaggcaaccgtccgacataaatgtttatcagccaacagtaaactattgtgataagaattggctaacaattgatcttcaccattatcaccaccatgccaaatcggtccaggcgtgtgaataataaacttggctggcaagttaaagccgccagttatccgcgcttctcccgttggacatccatgaaatttttcacaggcgccatataacgctgggccagctgctcaatgaatcgcaccatcgacaccaccgccacccattaaagttgtattagcggcattaacaattgcatcaacttttattttggtaatatctcctttgatcacgttgatttgcggcattatttagcccttctttctttaaattgcggaaataaccagattaatcctgtaaaagcaaaagatttcattgctaccataaacccagtaatgaaatcttgtaaatcgtttttaccaatatggaacactaaactatctaatttcataactaaaatagtaaaaattaataaagttattaagattttaatttttcttttccaactcatcaattcccatttactttgactaattaagtaaagtatatttatggaaaataatcccaataaaatgtaattaataatccgccatttctcactatcaacaccaatataaattattccgcttgattgaagtaagaaataaatacatccagctatattgataaaatacaaaacagttaaaagttgttgtttatgtatacttgttctgtgctcttctttatagttatttatcatctcatgatcctcccgtaataaatcatccaaactaacatggtagaggtcacttatttgaaccaacataaaaatatcaggataacttcaaccattttcccaactagaaattgttttacgtgagatcaacaatcgttctgctacatcctgctgagtccatcctttttgataacgatataatttcattttatcggcaaatttcaataagttctcctaccttcaattaaatttatttcccgggaaattaactatgcttaagctttaccgaagaaggcgatatttgtcacgctaagaatcatagcaaacaaaaaggctggagaaacttccaaccttctgtaaatcttaaattaccaaatatgaacccgatcttctggcgcccggtacatttcatcgctaggcttaatgtcaaatgctgtgtagaagtcatcgagattttctgcttgaatattagcacgtaatttttgcggtgcatggacatcaattgaaagcagtaattgcatgtattgttccgttgctttcattcgccaaatagttgcccagttaataaagaattcttgggcattgaagtcagcttcagtttttgctgcttcaagtgcacaactaaggcctcctgcatcggcaatattttcagaaaccgtgagcttcccgtttaccttttgcccagcaaatgggatcccatcaaattcttcaatcatcttttgggctaattgcttaaagtgtgcagaatcttcatctgtccaccaattattaagatttccaaactcatcaaataatgacccgttattgtcaaaggcgtgggaaatttcatgagcgattactgcgccaatcccaccataattttggctgctgctttgtttcaacgagtagaacggtgcctgtaggattgcagctgggaatacaatgatattcttaaatgggtgatagtaagcattaactgtggccgcactcatttcccatcgcatccgatcaacaggtttattccaacgactgaatagttctttattagccgtcactgttaattgatttaggtttgcaatcaatgattcctcttcatcaaccttaaattgatcatagagagcaggaatcttatctggatacccaacttgaatgcccagtttatcaagcttgaggatagccttatcacgggtatccttactaagccattggttattggtcaagcgtcctttatagactttaatcatttgctcaaccatgtggtgaacgtctgctttggcttgtggtccaaagtacttcttcccataataatccccagctacttgactaaacatgtcgcgggcaagataaaacgcaaatttacgttggctaactggtttcttgcttccagaaagtgcccgaccataacgtccattgatttcacgcatttcatcatcaaggtaactggcattttcgcggatgacacgaattaatgcccagtttttaaagagttcaaaattatcttgtaagatcttattcagggacttaaagtattccggttctgtcacaattattttttccggttcttccccaactaactgcttaattattgccgcaatatcaagttgatcagtggcactagctagttctgcaaccgtttgtggattatacatcttactataatcagccgcttcttctgcactttttacatttggcgcaagaagggcatcgaatttgattgcatcatcaataatcttttttgcttcttctttgctataccccaacttatccatcaaggcttccaccattgaagaccataattggagtaattgatcgtgctgagccttcttttctgcttcatagtagctcttatcaggcaaaataagcgatggtgatgaggcaaataaagcataaacagtcgcattcttcatatcagcgtcaatatcaaaactaatcggtgaaggcatccctgctaaaatccagttcttccattgagattggtaatcttcatatgaattaagattttctacacttgccaacatccgtttaagcggttgtgggccaactttcttacgccaatcaaactttttagcgaggcgatatagtttaatcatttcgttaaaacgcgaatcctcagacttttccttcccttctgcataggcatcaaagtcatccatcagttgcttgtcaatgtcatcaacaaggtcattgaagcccccggtagctggtttatcatcaggaatcttcgccgtctttagccattccccgtttactgcttcgtataagtcgtctttaattagttcgttattcactgccatgtgcagggcctccttaaaaggttacattacttactattatactatgcctactagaaattcacgtaaatttgcttcaatctaaaaaaggacttaataaagttttccgtgcactttctgaaaaccatgagtcatgttgcatcagtaattgatttacttcctggtaattacttaagtcaacctttcctttaattaatccagcaatttggagctgccgagcaaattgaacatctgcggactggagaaagttgcgaaaaatcggctgttcatctggatcccaccgcttattaagaagaccaattgcccgctcatattctttgctatgggtaagtaccttttgcatggcctgtggatttaaaattgttgtcatcaattatcccctcatttctaatactcttcccggtggctcttttactgataattgattagcctttgtcatcattagccaataaacattttgataatgataattattgattctttcctctccccacccatcagtaataataataattatgcgatttcgtttagttagatggtgttgatggagatagtcaaaaatacactgaaaacttgtacccccgccacctgttcgtctaaaatcaagttttttaccatcatgtagtttttgtttggtggtcacccgggcatcaaacgaataaacattagctgtcagttttgttttcttaagcatcttttcaagtgtcgttagtgtttgaacgatttcttgatcggtgaccgatccggaattatcaacaaaaatgtcaatggctggatccaatctcgtaactttgccaggcaaatccattcgtaatggttgccggcgattaaagcgagcatgcgaattaacttgtcctcgtgcaatcaacccaaactgatgcctaaaaacctgccgccaatcaactattttagttttttggactttctgtagctgtgatcttacatttcctggtaacaaaccgcgatctcgttgcggggtttgcctccaggaacgattcaaaatctgcttaatattcgctaagcgcacgacctgattgctgatctgctgacttgtcttagattgctgccagccgttatgagtatcagctattttaacctcatctgccgttgcattttcctcttgtttaccaccattcaatttaagacctggctgatgtaatttttcttgctgttcagcaggcagctgttctaatatattgagataatcctgcgaatctaattttggcattagtttttgacgaagagctttctccaattggctaagggttactgttccctgaggtggctcagttaaatactgatttaccgctacatcagttgcaatctggactaaatcttgatgaggataagaagcataacgtaatggatgcatccagataagatgaagggcttcatgttctaataagctttgaagttcatcattacgaacgttcgctaacttttctggattaataaccagtacaaggcgattgtcttcccacctcaatcccatcattgcgggtaactgtaaatcattctctcgtggaagttgtaataacacttctccgaaaaggcgctgtttttgaaggatgataataattgcctccctaatccgttgcgcagatgtcacatgattattgcttccatcattttgatgtaaccgtgatagaaagtccactaaactcatcgattatcaccactcgtcgcaacttccgcaaaatattgataaagttgcgctacagagccttggggatgtttaatggcttgctcatacattacttgcaagaggtcgacgaaatcctcaccaactgtttgaacaatcgcatactgcccatcttcactgactaattggagatacttaataaatagagctgcctcttcttcagatgctagcttaggacttagccatgaacgtaatacttgaattttggttgcttcatcagcattttcaaactgctccttgccatctttagcgtctttcaaggttgccactgtaagctcttgcccctgtgcaaggacaaactgagcaaaggccacccctacttcatcacctaagtcaccactaaatatatcagcagcaagttctttttgcattttctggtctaacgcctgtaattgatcaagattgcgagaaactctttcccaagcacgtggcgtgggagccaaatcttcattgttcggatcaacaactaataattgttcaggatattgcgtaagataggcggaaacaaggtcattaattccggttgcttgggcccattttaaccattccgccgttgaactcgtcattactaaacgaactgtccgatctttaattgcagcatccccagtcgcaacaccatattcacgatcagtaaatcctgtcatcgtagaatcaggattttccgcaataatgatccgtactgcggaaggcaaacgcaaagcattaatctttcgttgaaggacaaggttcattagttcactttgaacagcttgcgttccacgattaaattcatctaaaaaccaaataattgattgattaggatgggcttcggcatacttaataatgctaattaaagtttcagagtaaccgaattgtacatttgcaagacgaccataattcttcgtttcaacaaaagattcactggtcaagggggaaccggaattgcaaggtctcctttttcgcttaagctgacaaccgtagtaaataatgccgcattcagattagcagcaatttcacgaactaaagcagatttaccgatccccgcatccccgacaatattcggaacactacccgcatcgagaacaacgggaactgccgttaatagttgttgataagttagcgccattatttaccccttccaaccatgacattccagatccatgtcttgttttttcacgtttgatacatagggattgccttttacataaaagcggcgtggacttaacccatctttccccttcaaattaactccaatccgcgcagaaatagctatttctccaggaattttataattatgtaaatcaaccgttagtggacttgtttccataggctgcccatctaaatcccgtgaatgaattccgagagcttgtactaatttaccgggaccgttagtaatatttacccctgacatgtgccgattttcgatcattttatcgatgtttagcgccggttctattccgcgaagtaaaattccttgaggttcctctgcatcctgaaccacaatatcaaaacaataatgtccacggatttggtataggtaaatattcccgggcatcccatacaaagattccgagtagccagtgcgtcgtccgttaaaagcatgtgatgcagaatctttttctcctaaatatgcttctgtttcaacaatataaccaccaatgattccacttttagtttggtattttactagtttccctaaaagatccttcgcaatttcgactgtgggccgtccagtaaaaaattgttgatattttgttagcatatttattttcctcctaaaaagaactatcctaaacataacactaattaaaggagatcggcatgatggaactaaaaattgaacgaatttatactaaacctgttgatttagatggttatcgtatccttgttgaccgcatttggccacgcgggatttcaaaagaaaatgcacatcttgataagtggctcaaagaggtcggcccaagtaccgagctgcggaaatggtttggtcatgacgttgctcgttatccagaattcaaagaacgttatctcgcagaattaaccaacaatcctgtttactataattcattaaaggcaattgtccaaagtaagttgccgagtcagaacgttattctcctttacggggcaaaagatgaagaacataatcaagcaattattcttgctgacaagctccaaaaagatttacaactcgctataaaataatataattttgtattttttaggaataatttgttttataataatagtatgaggattttattcataattctctagtgcccattgtttcactgacttagttatataaattccttttgaaggtatcaataccacaaaggatttttacaaactttttagtgactttttctaatcgtgtaattagaatcacgggtaccaataaccccctagtttcattttgaaacaattatctgataaggtggaagtctattattgaagtggtaggtagacttctgctttatatttttaaatcaattatttgtcagcccaactacgaccatcgagctcaccggcggcattgactaggcgttgtgcttgttcaagcattaactgctctaatgcccggtaaaaagcttgatcttcatatgttgggctatttttcattaatttttttaattcttcgtgtgcccattgttgattctcatccattttagtcatcctctttttctcgaagccatccgatagaagtatgtaaatcatccagctcctcttgttgatcttgtaaaagtgccaataattgttctaatttagcttgttgaagaggatctaactcttgagcaattttaacgttaaggtggtcaataaaccattgcgtctgattgctaaaatgcaagaatttatctaaggtcaaatattgctgatagtggataaataaagactgccgctcttcttcactctgttgggcaaattgatagatcggcaatggtggcaaataattcatccccatcgcgtgcgctaaagcctgatatggtcgtaaaagttcagcaattgtatatccttgactggcacccggttgaaatgcagacgcagaatgagcaaccgtcgtaacaatccccaattcacgaccctttagcaaatgactgcttgtaagttgtgaattccatacctcatcaagccattgctttaagatcgccggcgcactataccaatacagcggaaattgaaaaataattcgggttgccgatttaagtaattcctgctcttgagaaatatcaaaaggtgtttttaattcatgccacataacgttattttcatcatcagcggctgcctttaaaaatgattcagtcgatgaattcgcaagttgagggtgagccactattaccagtgttttcatcaatttcactcctttaattctgcaaggccttgtttcaagacatcttctgtaacatcgacagttagaaatcgttgcagaggcgtttcactatgacgatccttaaaagccattggttctgcttttagaattacaacagtcaaattattttccgtcagcattaactgacccggatatttaaatttccccttagtatgttttccagtccgccaagtatgtaatttagcctcaccattctggtcaaatttcaactgatactttccactagcatctgtttcgacgggaatcccggtaaacttttgaacatcatacttatcttttttacccataatatatccttcttagtaattaatctaattttacggttccacttttaattggtccgcataggcattaacctcatcctgttggtcttcacttgtgtagtaattatttatcaaattcgtaacagtggtatgcgtagtagtcattggtgcccctgtcacattttgattttcagttgatccaatcattttaattgtgacatcattgcctttacgtttaaaccaaatatagctagtcaaatcaccctgtgttgttacatattgataatccgcaacttcaccataaccataatgcgttccataatacatttcaccattttgaactcctgccttaaaccaatcagggttctttaacaatgcaactaatgttcctagctgctgggtagttaatccatccttatccgtaattgtaactttaccacgcatatcaataattttggtgttttttgctactttcaaaacacgattaacttccccatgagttttggcatacgtcaccatttcagcgagtgttacgcctgttttgcgaataccattactactgttcgcatagtaaaccttatttccgacaattgtataataggttgaatttaaacgatcgccatcttcatcacttttggaagttaatttaatcatgtataaaactttggcgcctttaggataagtcttagcagaggatccctctcccatggcactgcacctttatcataaatcttaactgttgctccctgattattgttttccatatcagcagaataatcataatcatttgctcctggcatatgtgcatcacgatagtacaacacaagtgcagcagtttgcttaagtgttaatcgttcagcgtttagtgctgcatcatcccttatttgttgtgtacttgataaagaactagtcatactactagttgatctattagtacttgaggatgttctcccacaagccaccataaccatcatcgtcaatgaaagcatcaaaattagcgctatttttctcataaagatactcccacagatcttatatttaaagttttattataccttaatctttaggagtcatctaaaaagcctctataatcgatttggagacttccttttcattttattcagcaaaataatccttaatttctttgtctgacaagtcaaacttttcttttatctctttcttgaattagctgttctttttctttgagtcgatcctggccttctttaatttcatgtttacttttctgaagttctcgttttccttctaaaagctctcgttttccttctaggagttcacgttttccttctagtatctcccgtttgccatcccgtatcctacgttcaccctcacgaatctttttctcgcgcatttcttgatccatttcatatactgaacgtcgcatgtattccggcctccatttccggttccgctttacaactgctattctctcctttaattttacgacaagcggatcggtcgcttcaacttttcgttgggcaatatcgtggaggtcagctacttgcatctcaacatcataatcaagcatcactttgttgaagatatagtcatcggctaagcccgccatctcctactttttgcgtaagaattcattcatcgttatatcccccgttaaatagttctataaagatatatacgtaaaaggcaaagattttcacttttctactcaatatttttccaatgtatcattaatgcatattaataatgctttatcttttggctatggataagattcaactataatagatagtgaaaagtaaatcttctttattaggtattatctatggtatgtgtagataggatgttgaaaggaagcaatactatgttcgacgttatcttttggattcttgcaatctggtttgtagtaaacgttgtatggatgtggtttgcccttgataaccaagttctacaaaaaacattcgcatggattaatgtatgtgcaatcgtaattggtttttgggtatattacggcatgactcacgacggcaacgcccttaacggctggttccttacaatgaactgggtaaacattgcaattgctgctatccaattctactttggttatcgtgaaaacagcgttatccacaacggtcacacaaccgcatgattgatttacttttcaactagaactatggcttggggtcatggttctttttttgtaaatcgagtaggagataattgattagttcaattatcgacctctcacaccaccgtacgtacggttccgtatacggcggttcgacaacttaatcacattgaattgactggagcgtcttggacatattcataagtccgagttgttccagttttctattagttagagaatagctcaaggtcttactgtgtgcagttcgccagtagcccttgcgggtactagcgaagacatatgcatcacgctgggacagccccagcttctgtaagttagttaccttagttttaagcttcttccattgcttccagatatactgtcttattcgggccctcaaccacttgtcaaggcgttgaataaagtcagttagtttcccaattgagtagtactgaagccatccacgcatttttcgatgaatttcttcaaacattcttgtcagggatattccacgattacgtttagttaataacctcaatgctttctttactcgttgttgcgattgttttgctggacgggcgtaggctccattgtggtctacacccaacgaaaagccaagaaactttaaccgtagcgggctaccgactttggttttatctgggttcactttaactttcaatcgcttttcaagaaactgggtaatgcttcgcattactcgttctccggctcgttgacttttaacataaatgttacaatcatccgcatagcgcacaaagtggtgaccacgtctagtcaactctttatccaactcatttagatagatattcgccagtattggtgacaatggccctccttgtggggttcctttttcactcttagcgaaaagcccatggtctaagactccgctagttagaaacttacgaatgagccttagtgtccatgggtcatcaatatattgttgaagatacttaatcatcaagtcatgattaacattatcaaaataggcttttaggtctaagtcgacaactcttcgataaccttgattataaagatctactacttttgcaatagcgtcgtgagccccacggtgagggcggaagccaaaactattatcagagaaaacacgctcaaagataggtgtaagaatttgggccacagcttgttgaaccattcggtccaccactgttggtattccgagttttcttactccaccattaggcttcggaatttctacccgtttgactggtgctggtttatacttgccctcacgcaaactagcgatcaattccgtcttattttctctgagatatggcagaaggtcattgactgtcatatcgtcaatgcctgctgcccctttatttctcttaactcgcaaataagcctgattaaggttattgcggtccaagactaagtcttggatagtgacactcatacctttaccttcaccataatcggtactacgcgcccttgtgtactttcggttttccaaacctatcctcgacaagcggtcagcttgttgttctgttttctgcgattgtcgcacctgattacacctccgatataagttacaagttattgtcgttcagtccttcatctgattactcagactactatgacctcggctgacttctggcttactcaacgctacatcactgcaccgcttgtttctgtggaaattaaacttattcctcttgtcggaaacgtgtaggccagatctccccgggtaaggatattaactttcgtaccatgtcaccggtagctttactgaaagtaacttcgagtagtgttggactttaacttgtcatgcagtcttatccagttagttccagccttatagctacttcttgttcatcggtgcagtactttgccttagacttccttcagattccacctcgcagtggacacccttgtcctcagctcatggttccgactactacggcccatagcggactctcaccgcctagctaatacccatgccgggcgcacaaagaagagagtatggaaaaactaaaattttcccacactctcttttcaatttttcatattgatgacttgaactatttaaattctaaaacatataaaagcaatttattactatgcactgaaaatacacttacttcttcccaaacaaagctgccatctttgctgctacttcgggatcaagattatcggcaagcgtactttcatttgatttttgttcattttgctgattagtgatcgtttgcttaaggtcatcaatgactgcttgctcaccaacttcaatcggattaaccgttaaccggccacctgcagcatcagcatgaccgccaccattaaagtatttttcagcaaatttagccacatctaactttccgttgcttcgaagcgacacgctaaccggactgactaccaaggccgcatcgacttctggatgttgcactaataattcgtgggcaatttcagatttatagtcacttgcatatacgacactaaatttatgatcatcgatatctgtaattaaaatatctttcaaatggctcttaaggtactttgcccgccgttcgtttagtgtccgaatcaacagccgattttcttcctgatattgttgccagctggtattaaaaacattttggacaaactcttctgaatcttggaggggataaaaccaaaagagctgatcaagattatcggcatcaattctttcctgctcattcatttctggatcattttgccaatcccaagtatcatatgcccgaatcaattccacaagataagcaaggcctttttgccgttgctcatcaatctttgtaaaagacgattgttgttttaaccaatcccataccaagcttgtggcacttgggttaactgttggatcagcaggtacgatactattggccgcatacttttgtcgtagttctgcttcactttcatgatggtcaaagacaagccaatgattagcgaaacgttcattcaataacttaaatgaataatcgctatctggcgtcatatccatgatgtaaacatctgtaaatcgccctacttccgctgtttgcatccatcgacttaactcttcatcgattcgtccagcgccacagtttgtcatatcaaactctgtgtcttcaaacattactggttgtagtgtttttaataataatggagccccgaatccatctaaatcattgtgggaaaataattttattaaccgttgtgccatttttgatcctcgcaattctgattttgtttcttattataccgtagaaaatcggctaaaccacacttaattactgacatcacgctaacgaactgctatcattgaaattagtaactcattttaagaaaggaaaataatatggaagtttatgattatcgtcaagaattgattgacctcttaaataataccgctgatgatccacaaagcttactgcagacacagcgaagtcttaccaccattcttaatattttaaatcattaccaggaaagcaaacccgttaaacaaaatgcaccacggtttgttcaacgcaaaattcaatcgtcaaacgagttgcctccgcaagcacgcaaaacattgaagtcactgcttaccggtcctgctaatgatgaagagaagccaacctcaacggcaagcccagttgcatctccttcagttgaagcaccaaaagaaatcaccgaagaagaacgcctagcagccgacaatcgctacttagtacaccggaaattaagtggagccgagattaatcaccgttactacccggaagcaattctgcatgcattaccatttcctattgaggatggggacattgcccaactagactatgaacaaaaagtccgcggccttccagttattcggcagattaccggtgaccaccttagcgattacactcccgaaaaagtcaatgtgattgaatatggtgaattaaaacgcgtgcccggttctgatgtgcttcaactgagtaaaacaattaagggtaattcaatcgttgacgaagcgccagaaaacaccatcgtaattgatccctttaagtaccctggccgcgatattaagccaggaatggttattgattttgcctactatgatcgaggaaatggcctaactgataccaaagatggcgcgattcgctggattcatgaaaagcaagattatgatacaactaagcaaccagctaaaccaaaagttgttaaaaagcctgctaattctcgtcatgattatgagaaaaagctggactatgaccttcatcaacgaaaggtacttgttattaccggaatccgcagcaaggttaagggtcttaaaccagtcattgacaaacaccacggtctgttccgcggattagatgcgtctgcagaagaaaaagtttctagcagtaaattaaaacgcgaaattcgtgatgcagactttgtgattgtctgcatcgatgcaattcaccatcgaattagtcaactcgccaaccatcacgctaaacgttatgaaaagccacttgccattgcaaatgttacttctaatactgctgttgagcgagccattgcccgggcattaaatggtgatcctgcatacgccgaaagtagcgaagatttgaaaaattataaataaattttaatttactgttgacttttatgagaaataggttaatattaatgacaacaatttaattattcgatcgcaatgagaaagaagagtatgttagacgatagcttcagcgagtctcgtttggtgtgaggagacagttttaactctaattgaaaatcactttcgagtctacagcttaaataccagtaagctgtagtggttacacccattatcgtgtcagcgtatcgccatgatggccgtacgtgtgaggtattgttagcaatagcagtacaatgatagggtggtaccacgctcagcgtcccttagccagtttggctaagggacttttttgttgggatcagattaggaggagaaaacatgcaagatttaacatcgcgcaagttaacattcaaaaactatttagttgttgcatcattgcttttcggtttattctttggggccggaaacttgattttcccgttacaccttggtcaattagctggtagtcattggggaccagctgcagttggctttctgattactggagttcttttaccacttctatcagttctcgccgttgctgttacgcgtgcagaaggggtctttgatatcggtcgtccgcttggcgtcggtttcgccttagtattcatggttcttatccacgctacgatcggtccattattcggtacaccacggactgctactgtctcattcacagttgggcttgccccattcgttgataaacaatatcaatcccttgccttgctattattctcagctttattcttcggggcagccttcctcttctcataccgggaaaatgatatcttagctaacatcggaaaagtattaaatcccgtcttcttagcccttttattccttgtctttgttgttggtttcgctcgtccgcttggtaaccccgctaccgcacctacaactagtgcttatgttcacggtgcgctcactaacgggttccttgaaggatacaacactatggatgctcttgccggtcttgcatttggtgtaacagtggtaaccgccgttcgttctatgggacaacggtcagcaaaagatgtatccaaagtcgttgcaaaagctggtgtcctctcaatgggtgccgttgcttttatctacttattactaatccttcttggcgcaatgtctcttggtcgtttcaaagtttccccagatggtggagttgcctttaaccaattagttaatgcttatgccggtgcattcggacaagttgtactagcattcttgttaactgttacttgtttaacgacggctgttggtttagttgctgcttttgctcaagacttccataagcactttccaaaagttagctaccatgcatggcttgccctcagttgtctcgcctctttccttactgctaattttggcttagaccaaatcatcgcttggtcaacaccaatgttaatgttcctttacccattatcaatggtgcttatccttttatctgtgacatcaccactctttaaccgtgatggcgttgtctacttcttcgtggtccttttcaccgttgtaccagctctcggtgatatggttgttgccttcccagcggttgttagccaaagttcatttggcttatctgttgccgctttgcgaaataacttaccacttgcaagtatgggattatcctggcttgttccagcacttgtcggcttagtccttggtctcttagttcactggtaccgtcatcaacgggttgcttccaccagtatgcaaagcgaagtacattaataagtgtcttataggttaaaaagcgtgagaaatggctcattacaagagtcgtttcccacgcttttaaattattatttaacattatcgtattgggcaagattaaacttcttaatcgcatagatcagcttgctggcataatctggatcggttgcgtaaccattccgctgtaattcgtaagctgcctgttgataagtttttgctgtttgtactccatggaaacgtgcatgattatcagcaattccatttacaatgagcaatgtgtgcgcattaattgaatcagcccagctgttgtaaactgtaaagtattgttttacttgaacatttttaccccgaatattttcggtagtatacatttgaaccttttcgtcgtcactattagctttaattccaaataagttattgtatttattcgctaaccggctccgaccccagttcgattcaagtcctgcttgtgcaatcgtaatgctagctggaatatgatacttcttctgttcacgttgagcagctggcgcaatctgacgaacaaattcattgacggttatatctgtcgggtgggtctcacgttgaatttggggagattgatggataataatcgccacaatcccaaataaaataatcaaaaatgcaagtacacttccacaaatgatttttgtttcttttttcatgacgtgtctttcctttttatgaatttgacgctattataaccacttcaccatgagaaagcgagaatttacaatgatcttatttacttttaagctcgtttttatagttacccgaaatgtcaatttaagttagaaagaaagtagttgctcatcagtgacgtaggacatgaatacctcatatggagttcgatagcctagtgatttgcggggcaggttatttcgcttactcatcagttgggtcaccaattcatcaggaagattgcggaaatctagctgttttgttaagccgtcccggcgtaaaagaccgttgttgttttcgttcagccctcgttgattgggagcaccaacctcggcaaagtaagtgtgaaggtcaaattgattggcaatctcgcgccagccggcgaattcttttccgttgtcaaaggtaatcgatttgaagaagtgctgcgggaatttccgaagccactgacctaagtgttggttaatcgcatcagccgtcttttcgtgcacattgagtacaatttcgaccttcgattggcgttcggtcagggtcattaccgccccttggtgctttttgccttggacggtatcagcttcaaggtgtccaaattcagtggcatagtgcggaaagtccttggcacgctcgtgaatacttcgccccaattggccagccttcccgcggcgctcaatatagccattcgggtgccgcttacctcgcatgggcaaagcacggacatccaaaccgaactgcccccgttcaaacatccggtaaagagttcgccggttacaactaattgggcgctcagcgcgcccaataatggtgtcaggcgtccacccctgggcaattttgtcgttgatataagtaagttcagccagtgacaactgagtacgttttcggccacaacgttgcttattgcgcatatagtgatcttgataatcagcaattgaggcaccggtttccaggtaacgataaacgcgataaacggtttcggcgctacggttgatcatttgggccactcggtacgctttaagcttttgcacgaaagaatgggcgatgattgtcagctcgtttgtggtaagatgggtgtaagtcatttgtggtttcctttcttttgtttaggggtattcaaaagtctaccacaaatggcttttctatttttctaacttaattttacaaacggcgttattaaagtatttactatcagtcatcttcaatttaggaaagctcttgattagccggcgatgattccaactcaattgcttaccagctccctctttgtttagatgttgagcaaagtaccgttgccaatcttgaaggtgatctttaattgctaatttatccttaggagctgctttttcaagttgatccagcagtttctttcgataagcggctgctcgttcatcccattgctgagttgtaatatggaatttttccacactaataacgctgagaatagtgtcagttcccatcacgaggacaataattagggcaagcatcccgtgggtccatgattcttcccagttaataatccgctgaataaatggctgaacaaacttaaccagcaagacaacgccaatcccccagaaaaatgaaatttggagagcaactcttccttgaatgtttccttttagatgcgaatagtcccataacttcatatgaaaaagtttttcgagcagccaacttgctacatactcaaagatcgaagccacaataacccctactacgaatagcagaaaaatattatcttgaaacggataggtagtaatcaaaatcgtcgtaacggcaaatccatatattggacaataagggccaaataagaatccccggtaggtgaaatgatggtccttaattgaacagtaacaggtttcccataaccagccaataaatgaataggtaaaaaataagacaatgatttcagaaagtgaatagggcactcgtttcccctcctttttgaattcattgtctcatatatttctatttcaagctaagcttttcaacgttcaggatcttatcaagccatccttcaaagaatccttgttcgtgactaactaaaattaaatttcccgggaaatcttgcagggctttctttaacccttccttagtttcgtcgtccaggtggtttgtcggttcgtccatgataagaaaattacatggggttaactcgagaatggcaagtttaactttcgtctgctcgcctcctgataaaagattcatttccttcattgtattagcagcgttaatcccagcccgcgccaactttgtccgaatcgttcgtggctgcatcgttgggaacatattttgaattgtttgcagtggcgtaagcgttgggtcatcccactccaaatcttggtcaaagtaatttatccgggccgatggggagaaggttgctgttccgcccaacgctggaattttctttaaaattgatttaatcaaagtcgacttaccaaccccgttaaatccggtgaacaataatttttcacccattgtcatcgagaaagttactggcgctagtaatggtcggttataaccaactgataatttttctacccgcaacgcatttgctgatccggtattttcatacggaaaatggaaagttgcttttagattatcttcgggtggatcaatctttttcattcgtgcaagcatcttttcacgcgatttagccatagtcgattttgaaccggccttgtttttccgaataaaccgttgcgccttttcaatgaccacttgctgcttctcatattcccgctcttgggcttccttccgctcttccttttgccgcattgcttgttggaaacttccgcggtatttggtaattttaccaaatgacacatcacaaatggtattcgtaacttgttcaaggaagtcatagtcatgcgagataatcattgcggcaccatcaaaatcattaagatagtcgattaaccattcaatgtgagctgtatcaaggtagtttgtcggttcgtctagtaagatgacatctgggttctccaatagcatcttcgcaaggataatctttgaccgttgtcccccactcatctcagagacaacatgatccttaccgatatcagttaatcccaaaccattcattacccgctctacttccgtttcaatttcatagaagttattagcatcaagtttttcttggattcggcctgctttggtgaggagctcatcatccatcttttctgcataatccgcataaagcttattcatctggtcattaagctgataaagttccgtgaaagcagtatggaggaagtcaatcaatgtcatccccgccggaatatctacatactggtctaagtatccaattttgactcctttttgccatttgatagtgccatcgaccgggagggttttcccgatcaagattttaatcaaggtactcttcccggcaccattttgcccgacaatccccatgtgttcgtgcttttctagttgaaagctggcatcttcatagagctttttatcggcatagctcattgtcaagccttcaacatctaatactgccattctattctctcctctttttcttacttattacgagctaaaactgctatccatactatcatattttaggcacgagcttcaatttattggcaatagtcctactttaatgaaacaaggagccaccatatcattcctaaaataactacaataatccactatttgtctcgatgatgatcttaaagaaattagcaaaatacttagaaccaatgggattgagcatcaatagttattttaatatggctgtccggcaactggttattcaaaaaaaattccctttgaaatcctggctgaacaagaagactctaatttgacaactcggcgtgctttaattgaagctaaagcgaaggacttggggattattcctgatggttcgcctcatttcaaaaatgttgatgaagactaatggatgaattaatctacaaaccctaattcaaacgagactatcaaaaattatagtccgatttccaatattagagggttaaaaattaatagttaatttccattctctataatgctttatttctgtcatatcaacgatgcaaataatatttgctagcaatacgtattcagatataataaccttatccccatagaaaagaggaattaaagtgaaatttggagatcgcattaaagagcaacgtattaaattagaaatgacacaagcaaatgtggcacaggaactttttactaccagacagacaatttcaaactgggaaaagggaaaaagttaccctgatttagatacgcttattaagattagcgatttataccatgttccaattgattccttattgcgggaggataaagatttgaaaaataatttagatagaaaaattacgaataaaaaattcacaccacttttcatttttataaatttcggcattagcttttggtttattcttcagccttacataataactaatcatttatgggcaagattaggaaatcttggattagcaatttcgatgctgggaataataataacggctggtcactttagcgcatatattgaagactcacctcttataagaaaaattaactcctttgttaaggaaaaatttcttaggaagtctattgttatatctgtgattattttggtactaattatttttacgctatatcctacatcagtctccctatcaaataaaacagatctttactttggattttttgtccttattctagcaataattaatgttattcttgaattcgcaaattggatactagatagactactagaaaaaaggtaggtgataaaagatgacaaagtaccaaaagacggtaagaggacgaaatccgcaactaggtaatagtttaatttcactaggtcctcatggtggaattaactatgaatttaaaggaactaaagattcttatggattacataaaaaaagaacatataaagtatatagttcgaataatcgagacgaatggcaaaaatataatcaaactattgaagagcgtaaaagaaaaaaagaaatagaagctaaattaagatcatacaaacattatgtaaaaaaagctggtactaagagaaagtataatctatggccagagatcataattgatgtattttactatcataaaaagaatactatttcaaaatatgatttatttttgcttaaagaagctcattattgtaattcaaaaaaatgtattgttacaaaaatcaacaatggtaaagtatccattagatgtaaggctcgaaatagaattccatacactaagtttatttctctttacaataatgcaaataaactttcatatgaggtttagggtctatttttaataaataacccttaaagaatattgatatatcaagcccctatattctattatcagaatataggggttattattttataattaggataaatagcccctaaaataatgatgcaattgtgacgaacaaaatgtaacattgcaattgacaatatatttgagactattgctttacttactatccctatgtatcgcaataatgataatgaattttaggacaggagtaaattgacaatggagtttgcaaagcaattaaaaaagttacgaacagataaaggtttatcacaagaagatatcgcacaaaagattcatgtgacaagacaagctgtttcacgatgggaggctggttcctctgttcctgacttagaagcagccgttcagttggcagctttctttgacgtaagtcttgactggctagtattagacaagcaaccagccgataatgttacaaatcaagatatattaaatgcagtcaacgagctaagagacgacatcgatgatctaagtgatgatattgatgatttagatgatggcggtgttggttttagtgataatagaaaatcatttggtagttttctcgaggataattggtttctaattatagttatgtgtgtccttgtatacatgggattccatggaggtatcagctcctggaacggtaaatttttctaataaaaggagagtagcatgaaacaacacgttctacccatcaaagacaccaacattctacgcgaagtccaggacaccttacttaataatttccgctatggtcgccgaaactataccatcttccaagtcggcaaggcaacattgcttcgagtgagtgatgtattagcgctgagacgcaacgaaatcttcgctgatgatgaactatcaagaaaaatgcgtatattcgcgataaaaagactaaaaagcccaatattttgtatctaaaaccggttaaacaggatttactagattattatgcctggcttcaagaaaatgatattcaatccgaatggctttttccatcaaccacgcaccaagaccggtacttatcggatttacgtaatcccttgtcacagtaaaaatacagctattataaaatggtataataaaaaagtgcactggcgaccaccaatgcacaagtatacgttgtttggagctgattccttttggagacgttctttcacgcgcttagctggtggtgtatggcagtacaccagaataagagcgattttgctaaacttatcagcccaactattgaatataatatttcattagacagctatattatagcatgagttagcaactttatcgaccgtctggcttaatgtcaggcggtttttaattttctatataccttactaatggattaatcatatttattggacatggaagcaacaatgtacttctatgtctatttatttttatcatatataattgacactaaatttaagtaatgataaaatctctaatatatatgtcatatatatgtgtcataaggaggggaccaaatatttgaaccgtgttaaacaatttcgaaaagatcaaggattatcccagttaaagctagctcaaaaaattggagtagctcgtcaaactatcaacttaattgaaaataataagtataacccctcgttagaactttgtattaatttagctaaagcattaaatactgatcttaattcactattttgggaggaacatacggatgaaagaaacaattagcaccaaaatcattaagtggttttacggtattcatggaccattagatgaatatcgccgcaatgaactcaatcgaatcggtaataatattgccatatttttattatcaataaatctattattaagttttattgctagccttttaatgcttagtactaataattctgaacttactcttgatatcgtagtaagcgtcctactattaactgttttcgcttctttaggctatattctatatgaaactaaacgacatcatttaacagaaattgatgttgaagccaaacaggagagcaagactaaacaaaaatttattaaaagagcaattggcttaggaatttattttgcaattgtaatgtacggattaacaatccttatcgattggttacctaacaaaggagccttaattccattacttacagaaccttctacaattagtagtgttattgtcagtggccttatctacggactattaatgggtacttgggaaatacatcaaattaaaagcgatcctaatgacaaaaaagtaactcaaaatcacttacatcaaaaatattggttagttttatttattattatcgttattactagccttctattaatacataagtaattatatttccaaaaaatagaggcagtagttcgtgcatatgctgaagaaaaagaaattattttagacactgcaaaaacctttgataatactgatgacgcaatgagggagcttttcaaggacaaataataattgaaaaattagttttggccatcaatttcaacttgatattgattttgactaacacatttctcgatttcattttagttgttttctcaattttaaatacttatcaattgagcgccctaattcaaacacagagcctataaacaaaaaattagcaattgcgtttaaccagctccacggaatcatatttcttaaacaaaatccagcaattgttagtattatcaaagatgaataaatgcaaaaatcgcttctaagctcttttatttccttttgaagcttatcattagatttcgtcataatagttcctttctcggaaagaataattgtatctagtcataataccatatgccaatgtagatactttaacaatatctccttaatttattaggaaggaaaaacttgattggattgattttagttacagaaaaacaacctaagattagtttctagccttttctgctatacgccgtagccacagcgatttctcaagtatagaaaatttttattccaataattttctattcaaattattacagcaatttaacaattatgtaacaaccgccacccttaagatatttttcatatcttcttcacaatatcatcatatagtaaaagagtgcacaattagttgcatacataaaagaaaaacaaacaataattcaggagtgaataattatcgctaagaaaaaaacaatgtcaaaagtccttgctgctgccttaggtgctgctggtgcattagctgttgctaacactgtaagtgctgacacacaagttcaagtacaatcaggagatacagtatggggatttgctcaacaatacgctactactgttgattcaatttctactgctaaccaattagctgaccctaacgtaatttacgttggtcaacaattagttatcccatcttctgctatcagtgctgcttctgctgccgcaacagttgctgcacctactgcaactgataacgctactgctagtcaagcagccgttgaaactactgaaacaaccgctgcatcaactacaccagctgtttctgccacaaacgcaagcaacgtagccgaccaggcacaaccaacaacagtcgtatctactgcttctgataacaacactactgctcaagttagtgccgtatcccaagttccagcccaagtaagtgctgcttctgctactattagcgttgctcaaattagtgctgcaaatactaacaacaacgttactactttaacaacaactactaacactgcagctccaacacaaactacatacgctgccactgaagcagttgctactccacaaagcaacactactgttcaaagtactgctgctgtaaccgctactccagcaacttcaactgctgctggccaaggtaatggttctactgctaatgcggttgccgttgctcaagcacaaattggtactccatatgtttggggtggtaaccaaccaggcggatttgactgctcaggattagttcaatatgcatatggtcttggttcgaactaccggactacttaccaacaaactaacctcggtgcccaccacagtgatatccaaaacgctcaaagtggtgacctttacttctggggcccagatagtgctccttaccacgttgcaatcgctactggtaatggtggttacatccaagctcctacaccaggtcaaaacgttcaaactggtaacatcaactactacactcctagtttctacatcagcatgaactaagatacgagtagtataatcattgagtaagatagaagattttcttctaccttactcttttttcttagcaaattttaataattatattgacagctttattatcattggttatacttaacaacaattaattaagtagggagtaagtataatgaacgtatatcaaactatcaacgttaatactcgttggcaaagccggtaattcaggttgtttcgtcatggatgcgacctgaagaacagattgcatctgtgccggctgagtttgatgttcatttcagtccgcatggatccacatgcggacttttattttgcctttcaaaaagcgagggtccgtcatgtgggctctcgttttttattattttgtgaggtgagattttagatgaaaagaatgtatagtttaattgcaattattatcgctttcctttgtttcgcattctttagagaaaacaatggattcgtaactaagcaacgaattccaaaagttggtgtgttaaccttgatgcatcacccagcgttagatgaaatttataaaggatatgttgatgaattagcaaaggaaggttaccacaacggtaagaatatcaagattgagtatcaaaatgcgaacggtgaccaaagtaatcttaaaacaatggcttcaaaactcgttgatgataactcaactgttctttttggaattacgactcctgctgctcaagcattagctaattctactaccaaaacaccaattgtacttggtgctgttaccgatccaaaaacagctggactagttaaaaataatcagcatccgggtggcaatattactggagtatctgaccaagcaccaattcgcgagcagctcaatttgatcaagcaattcatgccgcgaatgaaaacactgggggtcatctacacttcaagtgatgcttcagcagtagccggttatcaccaaatcaagcgtgaatgtcgtaagatgaatattaacttgaaggcctattcaattgccaacagtaatgacttaaaccaagtttccgaacaaatgcttagcaaggttgatgcagtaattgtaccaacagataataccatcgctggagcaatgcaaactttagttaagaatgccgatgctgctagcaaaccagtcttcccggcaactgacacaatggttaagcaaggtggcgttgcaacttacagtgttaaccaacgtgctttaggtgtccaaggtgcaaagatgacggttgcaatcctcaaaggcaagtcaaaaccagctgatactccgattgagtacatgaagcatgggactcctgttctcaacattaagcaggcccgaaaacttaacttacaaattcccgctcaatttgaaaaggatgcagaaacgaaaggagaggtttacaaatgaatctaatcgtatcgtcaatcggtcaaggactattatgggctttacttggtcttggcctttacctgacttttagaattcttgattttgctgatatgactgttgaaggaactttccctcttggggccgccagtgctgttgctgcaatcacacatggcattaatccctttctggcaactttaattgcaattggtgctggaatgctcgccggtttgatcactggattgctctacactaaaggaaaaattcccagtttattagccggaattctaactatgaccgccgcctactccgttaacctccgcattatgggtaaatcaaacgtttcgttgcttggtcaaaagactctctttagcggtgaattcatgcgaagtctgccccaatactttgatagtgtcttcttgggaatagttacgattgcgattattaccgtaatcctggtcttcttcctttcaactgactatgggcaagcttttattgcaactggtgataatcctgtgatggcaaaatcattcgggattcatactgacacaatggtcatcatcggtctaatggtatcaaatgggatcgttggactttgtggtgcgttgattgctcaaaataatggatacgctgatattaatatggggattggaacgattgttatcgcccttgcttcaatcattattggtgaagtagcctttggtgaattaacacttaaccagcgacttgtcgccgttactcttggtagtatcatttaccgaatcatcttacttgctgtgctacaacttggtttctccgccaacgacctcaaccttatctcctcagttgtccttgcaatctgcatgatgttgccacaacttgaagaacgcattcaccttaaaaagccaattttgaaaggagtccggcctcatgaataaacctattttggaattacaaggtgtcaaaaccattgttaataagggcacatcgagtgaaacaactattcttaaaggcttaaaccttaaaattaatgagggagacttcattacgatcgttggaacgaatggtgctggtaaatcgaccctttttaatgtcatcggcggaaacctgcacgctgacgaaggaaaaattttgcataatggacaagatattaccaatacaacagaagaacagcgaacagctttcttatcccgtgtttttcaggatccaaaactggggacggctgcacgaatgaccgttgctgaaaacatgctattagcaactaaacgtggtgaacgtcgccatcttattccccggaagctcaaaagtaatatggaccgtttcaccaagctagctgcaacaatgaataatggtcttgagaatcgcatgaatacagctactggcgccctttcgggggacaacggcaagcattaagctttttaatggcaacaatcaaacgacctgacattattttgttggatgaacacactgctgctcttgatcctcatacaagcttaaatctattacacgctactaatgaacggatcactaaagatcatttaactgccttaatgattacccataaccttgaagatgccttagagtatggaaatcgtctaatcgtgcttaaagatggtgaaatcaaagcagattttaatgcagagcaacgaaaatctcttacccctgagaaactttatacttattttgaaggatagtttgactatatatcaaattcgatatattaagtatatcgaatttgatatataggagacttaattatgaattggtggattatttttatcacatttcttgccgtaaacctcgatttctttttcatcttaatctttttactcgaaaggtataaccttcgtgatgtaatcattggctatcttggtgcccttcttgttctggttaccatcagctttttactaggaaaaactctcgccattttcctccctgaatggattttaggaatactagggatcctccctatttacatggctctgcatgacaacgatgaagacccaactcatgcagaaaagcacggcccaattattaccaccttaataacctatctggcagtttgcgctggttgtaacctctcaattttcttaccaattttaacgaatcttaccttccagcaatttactcaggcacttctttttatcgcagtcctttcaattgcgatcgtgattctcattaagggaattggtaatattccactaattaagcaagcaatgcaacgttatagtgaaaccttaatgaaagttatttatatcggtgttggttgttatgttttttgggatagtggattaattacccaccttattcaccttctttagtttggtataataattactaaaccgattaaaaggaggagcagcaaccattgtcttcaacccaagcctttattgatgaagctgctaaaatctataaagttttaagtaatagtacgcgcttaaatatcttatattatctccggcactataacggtgaaacggatgttaaaacaatcgttaatgaccttcaccttgcgcaaccgatcgtctcaaagcaactcggtattttgtatcgttaccagttagtcagtcgccataaagaagggacccgcgtttactatgctttagatgatcctcatgttattgaaatgattgatgacatgctaaaacacgttaaacatgaaattaagggtgaacctcatccccgaaatttatataaataaagagtgaacaggaaacaatcatcaaaagggtattctctattcactctttttttgttgttgattatttttcgctcttgtggataaaagaattgaattaataaaataatcagtctttcactttgtattctgagtagcgtaaaatgattagcagattgtcaaaaggagactcaaaatggacgaattatttgaacattcttcaatcaaacgcgcatactttacacttgcactgccggtcgtattgagcatggcagtaactttgatttataacatggttgacacctttttcgtcgccaaaactggtaaccctgatttagttgcaggagtttctcagggagccccgattttcactttaatgattgccctaggtgacatttttgggcttggcggtagctcagttatttcccgcttatttggtgaacaccgtgataaattagcacgctttgtcagcggttattgcttctatgcaccaattatttgtgggatcatcgttacttcaataatgattatctttcaaacaccaattttacatttattaggtgcctcgccagctacttggcaatatgcacgagaatattacttagtgattgcttggggcgcggttttcattatctttggactttcaccaactaatattttgcgaacagaaggtctagccattcagtcgatgatcgctagtatggtggggaccggaattaatatcgttttaaatccaatttttatttttacatgtggactcggcgcagctggttcagcgttggctactgtaacaagtactgttattggcgatattttaatgatttattatttgcgaacaaagagtaaaaagttgacgacttcaattcatgaaacgaaaatcggctggaagcttcaatttgaaatctacgctatcggaatcccggcctcggtcactaacatcatggcaacgtttgcggttgcgttaactaatcgttacttgattgtttatggtgcggatagtgtagctgccatgggaattgcgatgaaagcaaatatgatcatcaatatggtaatagttggttttgcatttggcgcgcaacccttgatcggatacgtatacggcgctaaagatgagcaacggtttaataaagttgttaaatttgacattcaagttgttgctagtcttacctttatgctcactattattcttttcattttcgctccccaggttattcgcattttcatgagtgatccccaaatagtaaaagaaggtgccttgatgcttcgctggctgtcagtttcgactactcttgctggtatcattctcgtttttacaaccatgttccaatcaatgggaaaagcaacgcctgcattttggctctcattctgtcgtcaggggttgattttcggggtagtgattagtatttccgcaaaattatttggttatactggaatcattgctgctcaggctatttccgattgtttaacctttatcctggcacttattttcttttattgctatcgtccgcgttttaaataaaatagatttagacatacaaaaaaaggcctctcccgtttaaatttttcaaacgttagaagcctcttattagtttattcggttatttttcgttcaaagtaatgagccagtttagcctctggataatatccagttaccttttctttcgcctgtccatccttaaaaaggaccagacttgggacgctcattactttataccgttgtgcaatttcttgatttccatcaacattcatccgcacaaacttgattttatcaccgtattgcttttctagattttgcatagctggttccatcattttacatggaccacaccatggtgcccaaaaatcaacaaccgtcattgagccttgaacatccttatcaaaggtctcagctgttgcatcaattgccattttattctaccttctttttctgtgatctacgtataaagtgaataataatcgttaccgcaaaaacaagcaagataaaactaccgaaaatccctgatggaatctcgatgtcaattgcaggaatcgttaagaaaagtttaatagcaatcacaaagattaagatatatgccatcggttctaactcaggaactttgcgcatcagtttcataataacttcagcaattcctcgcatacatgcaatcccaatcagaccaccgattaaaacaataaccggattattagagacagctaatgacgccaaaacagaatcaatggagaaaataatatccataaattcgatctgtaaaacaactgtccaaaaaagctttcgtccagttaaatgcgttttaccttcacgggtctttcgcattgctcgcttaccaaagaacttattatgaaagtaacgatagacaaggtaaattaagtaagcagctccaataactttgatttcccaaaagttaatgagatatactccgattccaataattaagaatcggaaaatgtaagaaccccaaataccatagaaaagtgattcttcttgttcttttaacgttggtaatacacgtgtctgagccgctaacacaacagcattatcaactgacagtaaacattcaatcataaccaacgaaaagatgattaaccaatcctgccctgatgtaacgactgttgcccagttatgtggatcaaaaaatggtccatacaacttctctaaaagtgacaattaatgtcctcccttaatttaaatttgctttttagctaagttatattttaccaaataattttcaaaatacgacggtaatggcgcactaatatttaaagatttcattacgaagggtaatatgagtttttgcgctacaccatgaagcagcatcccctctgttgataaaggattataaagcggatcgccaacaatcggatgaccgctatgtgccaaatgaaccctgagttggtgtgtacggccagtcactaaatgaagtctcaccaaggaacgttcgtgattacttgccagtgtttcataataggtcaaggccggctgcgcgttttgtccgtttacttgatgaagatggggattcactggattacgcccaattgcccaatcgaactttccactctgagccatcttaccctccactaacgccaaatattgtcggtgaatttgcccatcactaattaatcggttaaggattgggacaacaattggattcttagcaacaattactgctccactcgtttgtaaatctatccgatgaaccatataagcattattttgactatgcgctaaatagcctgcaacatcgttcattaacgttcctgtttcaccatggtaattagggtgagttttttgtccccgcggtttatttactactaacaaatcgcgattctcatagaggacctctaagtgtgattgtgaagacggaatataatcatttgcggcaggggtccgaatttcatcaccacaaaatagcaactgaatattatcatttcttcccaccagttcattcattgaccgatattcaccattaacaagcactgtccgcctaattcgtaaatagtggattagacgattaggaagcagccattgatcatgcagtaatttgcgtaatggttttgtcacctggtcatcagctaacttttcactaatttgccaccgatatttcatcttactcacctctctttcgcctaaattctgataagattattttactgtatttcccagtaaatatttataatatttttaagccggtttacttttatccgataatagcgttgaatagagtatgagtaattttaaggggatgggtactgatgttaacaacagaacaaattaatgatcatagtaaatggataagtatattcgaacctctcccccatgagcgattagatttaattgaaaaatatgaggttactcaagaattacttgattatgcaattgacccttacgaaaaagcccgggttgaaattgatccagatgcaggagttacattattaattttcgatgtctatgtaccaactcatgctgtgactgctccacagactgcaccaattggcatcatgctcaccgctaataatatcattacttttacaaatgcaaaaactaactttgtaaatggaatcatcgctaatcagctacaattattaaagaaacacggggaaaatgacgacaaattaaacttagtgttcccagttctttatcgcctttcgactgattattttggtccccttcgtcgtgcagatcaacagcgacaagaaattcaacgaaatcttcaacgacgaacgggccgccaagccattactcaatttatggaaattgaaactggcctagtttatattcttacctcgctcaaagggaatgtttccctacttgaagaatttaaacgccgctttggtaaccacattactactaagcaatataatgatcttgacgatgtaattgtcgaagcacagcaagggctagaaatggcacagatgacttcagatgtttctgcccgtgtctctaatgcttatagcaaggttcttgatagtgatctaaaccaaacgatgaaatacctaaccatttattcaattgttctctcaatcccaacaattgtatctggcttttacggtgaaaacgtcaaactaccccttgcgaacgggacctattcatgggtttttacaattttcattactattgtcttaatgttggcatgtgtcatctttcttattaatcgtcattggtggaaataaaaatcggaagctgagaacttttttctcaagcttccgattttttataagttatcgccacgttcaaattgaaatttagaattcaacaacgcttcatgtaaaagctggttaatcaatttatgtgtttcattcagaacatgattagcggttttcatattttgttcagttaggtagttaattaaattagctgaattttgaatctgggctgtttttgtaattgtgtctactcgtcctacgccatagctttgacaccgatcacggaaatcatttacctcattgataaattcatgatagtgtggttctacaatcacttctaacaatttatttaaccaataagcactcttatccggctgcgcatcatctgtcgcatacttatattttgccggagtatcactaatatttgtaaagaacggaacataagggctatagcaataaaagccaaaattaatccattgaatagcagcatattgtgccggtacgtcattccgaatttgcaaaatacatgaactttgattacgatcaagtgcaattgaacggaattttcgctgttcctccggtgttccagacgcataggttcccattggatcataaggagtgccattataatgcgatgagaggaaatactctacatcctcaacagcaattttcttttctgcatgttgaataaacggaattttttggctagtaggctcctgttttaaagatggggtaaagagtttttgaccataccaagaacgaggtgtgttgtagtaagcatccgcctcatcttgtgtgccaaaaatattccggaaattaaacgttcgtgaattagggtttaaatgatatttttctacaaaatctttaatttgcggcgcatacataaagctatcgtgatcattaaagtcgacttcttcaatgcacataatatttggtgcaattgcataagcatcatcaggaatccgctgggcaacccattgatggccaccaccggtctcaaaataccaaacttcatccttatcgctaaaggcaattccattactctcaccggtaccgtatttttcaattagggaaccaagacgttgaactccttcgcgggcggacttaataaatggtaggacgagataaaccattgaatcttcattaatcccgttttctactaacggatcatgaccaagcaccctggcatttgtcatctcggtttctgtcgcgctcatcgcaacattatattcattaatgccttgttcatcccagcgtccttcatcaggcatgccattgggagttgccgtataacggcatccctgtcccttcatctcaacagttaacccattatattttgaaacataatgttcaccggtgtaatccttggcaggaaatactttgaatatcttaggattgactccatcttctgcatcctcatcacgtgcaataattgttgaaccatcaatcgtcgcattctttccaacaagcattgccgtacaactactcattagcttttgcatagtatacgcttccttccacagtagttactgtaccttctaataataccactatctggaattaactggattataaagaaaaagctgaacgttaatcacacaagccaatctaaaatatcattaataccgaacaaaccattgaaaatgttcggtattagtgctaggataactacatcaaataaatagcctatataataccgaaatatggtcggttagtctctacctaaagccgtaaactttagactataagcacttcttaaaaactgacactgtctgtttttaactttaagcttttaaaaatcggtagagaggctgaattttcagtctcttatttttatttaggcgtgttaatttttggggaggtatattttgaaagaacctgtttcatctattcaagcacctagtcgtcacactaaaatcgatttcactcgtcaatggcaaaattttgtccttggtttccagcacttacttgcaatgtattctggggacgttcttgttccgctattaattggacattacttacatttctccacgcttcaaatgacttatctagtctcaatcgatattttcatgtgtggtgtcgcaaccctcttacaattaaagcgaacaccattaactggaatcggcttgcctgttgtcctcggttgcgcagttcaagctgttactcccctcgaaacaattggtggaaagctaggaatcacttatatgtatggggccattattgcagccgggatctttgttttcctaattgctggcttttttgcccgcttaaaaaagttttttccaccggtcgttactggatctttaataactattattggatttacccttgttccagtaggtttccaagacctaggaggaggtacgccaactgctgcttcatttggtgatcccgctaacctccttatcggctttctaacaattgccatcattctgttattcaatgcctttgctcgtggctttatgaaatcaatcgccattttactaggaattttaatttcttctttcattgcaggcgcattaggctttgtctctcttaaaccggttagtgaagctgcttggttccacgctccgcaattattcttctttggcgttccacgttttgatatgagtgccatgatcacaatgattcttgtttcgctcacgacaatgattgagtcaaccggtgttttctttgcccttagcgacattactggccgtcaattaacaaccaacgacttagaacgtggataccgcgctgaagggattgctgcaattttaggcggactttttaataccttcccttattctactttctctgaaaatgtgggtgttcttaaaatgtctggagtgaaaagtcgtcaacccgtttactatgccgcctttttactcttattgcttggtcttttacctaaagtcggcgctctcgcaacggttattccagaacctgtccttggtggtgcaatgattgtgatgtttgggatggtcggtgttcaaggagttcaaattctccataaagttgatttctctaacaatgccaaccttcttactgcatctgtttcaattggactaggattagggattaccatgtatccgcaactgttccagcatatgccaactgaatttcaaatcatcctgggtaacgggattgtcgtcaccagtctttcagccgttcttcttaatctgttatttaatcaccggtgggctaatcataattaattctcattcttttttaatttagttgttgacattcaaatctcagcacgatattataatttcaacaattatcgtttcagtagaaccttcgttgggcgtaagagagccggtggtgaggtgcgaaccggtcaggcgaagtgtttcgaattatcacgtgatctgaattgtccggccatattcagtgccgttaccacctgatatgagtgcgcataaaatcaagatgcgtaggtgggtggtaccgcgattaaaataatcgtcccgttgatacttttatcaacgggacttttttatttcttttctaaggaggaacaacgatgaagagtattcgtttcaaagaggccgcaaccctcttacttatcatgctaataattttagggactgccgtgattaggtttggcttgtcaccacagatccccgtcctatttgtcattgctttacttattttttgggttaagcttcgtggtgctagttgggacgagattcataagggtatccaagaaggaatcggtaccgcaatcatccccatctttatctttatccttattggcgcattaatcgctgtttggattcaagctggagtcatccctacaattatgattgtcggcttcaaactgattagcagtcaattttttgttccatcaacatttattgtctgctctttagtcggtctatccattggtagtggttttacaactatttcgacaatcggaattgccttatttggaatgggagttgcgcttaatgctaatcctgcgctggtagcgggtgcgatcatttcgggagccgtttttggtgataaaatgtcgccgctctctgattcaactaatcttgcctctgcaattgcaggtagtgaccttttcgcccatattaagaatatgatgtggtcaacgattccttcttttatcgtttcgctaattctattctggttctttggtaattccagttctcatatcagcaccggtaagatcgcccacacaatggctatccttaatcaacaatttatgatttcatggtgggccctactaccaatcgccttaatgtttatctgtgcatggcgtcatattccagctattccaaccttatttatcaatatcatcgttacagtagtcatgatctccttccaaaatccaggaatctctcttcaatccctcgctaaattaattagtgatggttttgttgctcataccagcgatgcaactgttaatacattgcttactcgtggtgggattagcaacatgatgggaacagtttccctgatcattgttaccctttcactgggaggaattttgatgaagtttaacattgttcagtcagcaatgaagccactcgttgatcatcttcacaagcctggcagtcttattactgttaccattctctcaggtattggcattaatctttttgttggggagcaatacctttccgttattcttccaggtaaggcatttaagggtgcatttgataaaatgggtctttcacctttagctcttagtcgtgtccttgaagatggcggaagtgttattaactacttaatcccatggggagttgccggctcattcgtcgcctcaacccttggtgtaccagtccttcacttcctaccattcgctttctttagtctgttttcaccagtcttctcaattttaagtggagttacggggattggtttgaagtggcaaaaaggaaagcaacacaatactacaaatgaaaatcaaataaaggaagcttaaaaaaaatctgggtttgagagtttctcttacccagacttttttattatcctgcaattaatacttctgttaccaataatccaccaccaaagattaaaacaaagacaactaccggccacacgaaccgcagccaatgagaatatcgcatatcaagcatttgcaaagttgccattactaatccagtcggtactaagaataacattgcatattgcccaaattgatatgcagtaacaaccgtatatcgtggaatatgaaccgtatcagctagtggagctaaaattggcattgctagcactgctaaaccagatgatgatggaacgataaagcctaagacaaagaataccaacatcatcacaataatgaaaaatgatccgttcatatgcgcaaccatttttgaagaagcatagagaattgtatcagaaatatagccatcattaagcactttattaattccccgtgccaaaccaataattaatgacacaccgactaagctagctgctccatcagaaaaagctgttgtggtcttatattcgcctaaaccttcttggtgcccgaaacatgttaaaaacataataataatatcaattgttaagaaagctgatgccatattaggaaaggcccatcctttggccattactccccaaatcataattgggaaagcacaagcaaataaaattaaaataattttcttttttaaagtaaaccgctgatctttttcttcgctagtagtcattccccacatttgatcaaatttgtcccggtcatcataggaataggagaactgtggattctgttgtactttgcgtgcataccaatgaaagtaaaataataaacaagtaactgcaataaccaagccaaaaattcgtcctgccattccttgcgtaaaagttgtcccagcagcatttgacgcaattacaactgaaaacggattaattactgaaaatgttgttccaagcgaacttgctaagaaaatagccccaacacaaacaattgaatcataacccatcgcaataaaaactggggctaagattggataaaaggcacccgcttcttcttcaatcccacatagggttccgccaagtgctagtaaaactgtcacgaggaacactaaaataaattctttccccttagttttggtagatagcgcggctagcccagattcaaaggctccacttgctttaacaacaccaatcaaaccacctaagactaagataaaaatcataatatcaactgattctatcgtaccatcgaccatactagagaaaatatcgctgaccgaagcaggatgctgttcaagccgcttataagttcccgatactgaaattggcttattgattgcaccagatttaaactggtcgacatcaatctgaatgtgcaatttatctaatgttgcctgtgttgccggataactaattttttctccagttggttgtgttacttggagatgatcattgacatatgctaacttagaataacttcccgctggaacaatccaagtaagcattactgcgatcactgtcagaaagaataaaattgtaaacgcgcctggcattttcagtttgaaccgatgtcttttctctgctgttgcttctcccatcttcctcactcctcaagtcttctttctcccttctgttaattttagcaagcgttttcttgtttcttgatataatcttttatttgttgtgctttaaccaaagtggttgaaaaattatcattcataatctgtctcctaatctactcggtttattacgattagccaaaagtcatccataagtttcactatttgaaattttttattatttatactaaaaatactccatgcattcaagcacagagtattcatctttacttattatattcaacaatttccatatcattatcggtcaacgttgcgcgcgtcaggcttccatttgctgggcgctctgtcacatcatactttccatgaccaaaccgttctactaaacttaaaacggtatttccatgacttacccataaaacatttgcattatcaggtaaatcagcattccgaattaattcaatacctttgttcattcgttgccagtactcttcattattttcggcatcatgaaatggatcagcatcctttaaccagtctttggcttgaccaatggaatatgcggttacaatttcacggaagttcttaaagccatgaggggcacccgcattgtaccaagcaagatccatatttgttccttcatatgatccataaaactcttcccgaaaataaggagcagtgactggatgagctacagaattagcattattaagatttaagattacttgtgctgtttccattgctcgggaaaggtcactacaaaacgcaccatcgaagtgaatgttttgtaacttctccccagctacctttgcatcttctttgcccttcatagttaatggcgaattactccaaccctgtaatttgttgtaaatgttgaagaaagtctgtccatgacgaacaagataaatattcaatttagtcataacgatccctccataatcttattgtaccgcttacaaatccttaagactatttaagtattaactttgagctttaaacataatttcttcatattctccacgtagactaaaaaatatagaaggaaggaattattatgaaacttagagacactagtcaaccaaatattgttgccgctaagattattaaagttactccgaaaaatgttaccgtaattactgaagaaggccacttactcaagattccattaactaaacaatatcgggaagataaaactttacgggcatcattggttgatatcttgaaagcaggaatatggattccagtaaataaaaagctaaaaaaattatttagttatgactggctttttgttcctgccttggtcccagcaaagaattaagtttcttcaatgatttccataaaaagaatgttttgtagtaatctatgataaaataattcttgatttgtcgaaattgcacttcgataatatagaacaaaccatattgattgcgaggaacattcctaatgaaaaaattaagcaaatttgtggatactaggattggttttttcaccctcctagttatccttttttggttaaagaccctgtttgcttactttactgactttaagcttggcgttacgggaatttttcaataccttattttaatttttaacccattagcgaccaccttttttatttacagtttagcattctactttaagcgttcgcggttcttctacccagttattatgggtctagatatcgcaaacaccctattactctatttaaacgtcatctattatcgtgaatttaccgattttatgacaattgctacgatgaccggttattcaaaagttaatcaaggtttaagtggtagttcacttgccctcactaactttcatgatgtcttttactggttagatatcgtcgtaattcttattttaatgctctgtaaagttatcaaatttgatccacgagcaattggaacgcggttagcatttgcttttagctccgttggccttgtcttatttgggattaatttatcttttgcagaaatgagtcgcccacaattactctgccggacatttgatcgttcctacattgtgaaatatcttgggattgatacttttactggttatgatttagtgaagtcgcaacatatcaataatatgcgacaaagtgctactaaacctgagctcctaaaagttaagaagttcactgataagcactacgctccggccaatccacaaatgtatggaattgcaaagggtcgtaacgtgattattattcaccttgaaagtttccaacaatttttaattaacaagaagatcaatgggcaagaagttaccccattccttaactcgctttataacggtaaggatgcctactcgtttgataatttcttccatcaagtcggtcaaggtaagaccagtgacgcggaaaaccttttagagactagtacatttggattgccacaaggatctttatttgccacactagggagtgacaatactttccaaggtgctcctgcgattcttaatcaacgcgccggttacacgagcgcagtcttccacggaaacgttgctagtttctggaaccgcaataatgtatacaagaatttaggctatcagtacttctttgatgctagttattacgatacttctggagacaaggctaccggatatggacttaaagataagttattattcaaaaactcgatcaagtatcttcaaagtttacagcaaccattctacgctaaatatattactgttactaaccacttcccttacacgcttgatgatgaggataaagatccaaacttccaaacaactaataccggggacagtaacgtcgataattacttcgtaacagctcattatcttgatcaatcaatccaagaattctttaactatctccaaaagactggtcttgataagaaatcaatcattatgatttatggtgatcattatgggatttcaaacagtgaaaatacttccttagcaagtgttcttgggaagagtgcagatgattggactgactttgataatgctcagctgcaacgtgtaccactaatgtttgtcattcctggtacgggtcacggaaaagtttatcatacctatggtggagaagttgatgttcttccaactctccttcacttattaggaattagcagtaaacgctatattcaatttggaaccgatctcttctccagcaagcataatcaagtggttgccttccgtaatcgggattttgttacgccaacttatacgagtgtgggcggaacaatttacaataataagactgggaaagaagctaaacttaccaagaagcagcaagagaaattaaagaaggatcaagattttgtaaatgaggaattaactctttctgattcattaaatgaaaagaatctcttgcggttctaccatccaaaagggtttaaaaacgttaacccagctgattataattattcaaatggtctaaaacgagcgcagcgaatcgagaagaagaaaggaattaaatcaacaagtatttactcagaaaacggtgaccgttcaactgtagatgactacagcactgacgcccctgagcaaagccactcttccactgattccaaccgtattaagatcactaacccagatgctaataataagtagtaagggtacaaaatagtatagtagggtctaggagagcactgtgttctgcctaggctctattttttaagtttaagctaatttcaatcagctaaattttctctccattaataaaagtgatattattaacttgtacacaaagaataatggagggatttttatggttgaagaatttggctcaccgtcgtcttacatccaaggcaaaggtgtcctttttgaaagtgataagtatcttaaaaactttggcacaaaaccgttattactggctggcgaaaccgtctataaaattgtaggtaagcgttttgaacaatatcttcaagaaagtggttatgatgttacccgtgttcaatttaatggggaatcatccactaacgaagtaaaccgggtcacagaaattggtaaagaaaataatgtaaccgtcgtttatggtcttggtgggggtaaaacagttgataccgccaaagcaattgccgacaatctccatctacccgttgtaattatgccaacgttggcttcaaatgatgcaccttgttcacgtctctcagtaatttatactgatgacggtggatttgaccattatcgtttctacaaccaaaatcctgacttggtcttagttgatacacaagttatcgctaatggtcctgttcggatgttaatttctggaattgctgatgctttagctactaatattgaagcacaagcagttgccaaagctaatagcgatacaatgcttggtgaaaaacaaacccttgttggaaatgcaatcgctcagaagtgtgaagaaacattatttaattactcacacctagctgtagctgatgcagaagcgcatgtcgttacaccagcattttctaatatcgttgaagcaaatacactaatgagcggtctcggttttgaaagtggtggtctatctggtgcccacgctattcatgatggcttaacaattttagaagagactcatgatttaacacacggtgaaaaggtcgcatacggtaccttaacacaattaatgttggaaggcgctgaccaggaacgttataacaagtacttccaatttattctttctttaggtctaccaactactcttgctgatctacatttagaaaatgtcactgatgaagaattactcaatgctggaaaagccgcctgttcagaacaagataccatggatcgtttaccatttaaggtaacaccagatgacgtggctcaagcattacgagcagttgatgcatatactaagcaatatttaaatagtcaccattgtcatcatagccagatgtaataaaagggagcgagacagaagtcacttgtgacttcgtttttcgacgcgaagctagcctctgggagccccccgcaagcaacaataggcctctgacgttcggtttccggacgttagaggccattgttgtactgcgtatttgctttttatgaaagtaacttaacttatgtcacagtccctttttttgttatttaccctataagaaattaattaatgctttatcaacttgagtattattatgaagttttgaatgttgagtatcttttcctgttatttttagaacacggtatgactttgcccgagcagccactagatacttaagtgacaatgaagatacattatcaacagtaccgtctgaatgattaccaacatcaccaataatattaagaacagctacttgacctttcggataagtttgccgtacttctgtcatttgacgatatgtggcgttcatttcatttggttttccgtctttatttaatttcattccaactggttgctggatagcagcaggtacctgtttaaaattcaatccagcaaaatgacctgcgatatcaacctgtttttgtaattgaggcatattctgatttttaccgttttgcaacatatagtaaataatcgaaatatttcccaggaaatgaccaaccatattaatcttagttatgcgatatcgtttctgtaatgcttttacaacatttgtcgcatattcgccatgcttattaaaatccaactgcctattattatcataattcacctcaacaattggattaatgacccctttatgcattgaaccatgaagagtaacttttccgttattagtaacatcagctcgcaggactatgctcgttaccccggcttttttagcagcatttaccatgtgttcttctgcatgataactactacctccaccacggaaaaatagtgttggcgttgttgattgcatatatttactatgtttttgctgacgccaaactgcaccaccaattattgccaagataacaattactatcactacaccaatcccaatatggctttttttcataattttcacccgcttttttatttacctagattataagcctaagaacaataatgcagtcaaaaattactttaatgtagaagacgttgccaaaagtttccccgtcgaacatcattagcactatatagagagtaagttaatggttcaccatcaagcgtttctaattgatcactcgttatccttaagttgccaacacgttcacctttccagataggtgcttctagttttttctttttatattgtgttccaattgtataattcgtttttgtatcgtaaggactccaaatagttacatgttgtggcgtgagtttcattgttttttcaacaccattagctactttacgtgttgttactgatgatggaacttttattttttgtaaatggtcctctgtcttaaggatcttatataaatcctgcgtagccttaaatcggttgtctttattgctcccttttgaatgtaaaataacagtaataatgcgatgtccttgatacttacctgtacttgtaaaacaagctcccgcactgtcagaagtccccgtcttcaagccatcaatcgttaccccttttacagcgtactgttctcccggtaacatcttattaagattttttgcagtcttaacttgatcttttgctatttgaaattttacttctttttgtgctgtaatttgcaaaagttcaggataatgttttacaaagtattgcgataaaatggcaacatcacgtgcactcatcgtattagcagcattattagggagatccgctaacttaaaacttttcatatctccattatctaatccaaccgaattcacaatgtttgtcttagtcattccaatttttttggctttttgcatcattttaagattaaattcatcggttccatccccggtagctgttgcaagtgcgacagtcgccccatccgctgactttacaagggctgcattgattaatgtccgaactgaataagattgaccagattttagtccgattgaagaataagcagcatcattagaaatagccgcaatttcaggagttatttttacttgagtatcccatgaaagttgcttttgttggatttcatcttctattaccaaaatagttaataattttgtaattgatgccacgggaagagccttatctacattttgcttatagataatttgccctgttgaagcatcagccatgatcgctgcagaagcatcaattcgattatttgctaacactgattgacttcctaccattagcatcatgaatagagataaaataaaaactgtcaactttttcataaaatctattctcctattttcttcaagtacggtaagataaacttaataataaataataaaggaattcattatgaataaagaacttaaatcgctgcttttcatctcaactggtctattccttatttttgttctaatttttaatctttatacatataatgctgctagttttattccccaagctagcaaaacaagtcaaattcttagtcaaaatcggcttcgtgctcctaatattcaccgttcctctgaaaattgggcataccctaagatcggtaacgctcctattgaattgatcgccatcaaacaagcaaaaaggattctagttatcaactcaaataagcgccaagttatttacattattcacgcacagattaatctaccagcacaaaaaaattctttccgcttacttcacgctcggggcagcaaatttatcatattaatggttcccagcaagccatcgctaagaattggttaggaattactaatgggaactacattgaaacccccgttacagatatgaataatcatcaggtctcacgaaatctacgaaaagcacccaaaattgaaaatactatccaggtgtcaatccccgatgctaaatggctgcaaactttacctgaaaacacacccttaatagttaaggaggactattaatatgatttcacgcctaaaacatggacggttttttaatcacttacttggaagtaatcttattttgctaattataattagcttttataatcttcttacatacttcatcccattaatcaaaatttcaatcattcaaataattttattctttctaataattgacctactcttgattatctttaagattttagcgctatacaattagccgacaatctcaatcttagtaccaactggcaaattcttttccatccattgagcgtctggcactgaaagccgaatacacccgtgagaaccctgtgtttttccaagcttagcagcttcttgttcattatattttccatctgctttagtcggaacactatggaacaagtattctccatgattcttccaagaaacgtagtaattagctccctctttcaacgattgattaaagaagctatctcctcgctcttgctgagcataaaatgttcctgtcggggtcacacttttcagtttaccagttttaggatcctttttataaattccacctgtgctatacattgtataaatgacttttgaaccatcatacaaatatgtccgattattttttaaatcaactttaatccaaaagtccttcactttattcaaatctggatacggaactgtttccgaggacttatgccaatcaattggggttcgcatatgactttcactattatcgattttcttttcttgtgttggtttttcttttacttgcgattcaactactgctttttggggatgggcattcgaagtagcacgtaattctggaccaattgcaattattgctactaataagcaaaatattccataaatccaatgcttcacttgtaagttcaaattaatttctcctttacagataattcaaaacatcactattataattatagggaattttttattcaatatactttaaaaaaggtgtacaaaatgcgggataatcttaaagtttcatacttaactgctatctttttctttattgttgctatcatttatgcaaatcttgcgtaataatcgtgaggattctactatgacatcatttttttcattcatatcaaatatttggtcgtataccatcaaccataaatggtcaaaggatattttacgagccaacatcctttttattcttttagttattgtttacgatctttttcacttttcattaaaaataattaattggcggatcttttttaaagtatttctgctattaaatatttgtttgttttttaagttccttttagatggtattgatcgctatttaagaacacggtaactttataaattctttattgagttatcaattttccgtgctaagataggaacgtaattatttattttcgatttgaggaaggtacaatgcattcatatattaaatactggatagcaggaataggagcattattaattataatgattgcggggatgactgttcaccagaaaaatcatttcaataaaaacgtaaccatcaataacattgccgtgggagggctaacagccaagcaagcttttgataaggtaaaggggacctcaggagcaaccaaggtatatgttgacaataagctagtttaccaaactaaatccatgaaggctaattttagcaataatgatgaacaaaaatttaatcaagcactgaaaaagcagtttacatttttcccatcacataaagcaacgaacttatcaataaagccagataactttgatcaagattcgtttaatattgcgaaaaacaaattaactaacgaggtacatcaactcaacacaagtcgtaaagctcccgttgatgcttacgcggtctaccaaaataagaaagtttctgtagttcctgcagttaagggtaataaatatgatttaccaaacgctgttaatcaactaaataatcaagccggaagtactaaaattaatattactttacataaggaacagccgattgctgcaaatagcaaaaccgttaagaacgaggaaaaacagttaaataagttaaaagggaagaaagttacttacctcgttcaaaatgaaaagtataacctcactaccaatcaaattattacccgggcaacctatcaaaacggcaagtatcatttcgacactacggccttaaataaacaagtaaagaaaatcaatgagaaacatgcaactcttgataagccatttaaatttagaactcattctggagcagaaattaccactacagctaatggttcctatggttggaaaattagcgagaaaaaagctggcaattcattaactaaagcaattatcgatggccgccaagaagttgatggcgagcacgatattgaaggaaaaggctataacactgctggactcggctacaatgttacatccaataatggtattggcgacacttatgctgaggtttcattagctgaccaacgagcttatttctacaaagatggtaaatgtgtccttgaaacagatatcgttagtgggactaataacgaaggcaacaaaacgccaaagggagtctggtatatcatgtaccaacaaagtccttccgttctccgtggacaaaacgatgacggatcaagttatgcaagtaaagttaattattggtcgccgtttactttaacgggatgtggcttccacgatgcaagttggcgtcacaattggtccaagactgcttacctaagcgatggttcgcacggctgtattaatatgcaaccaagcgtggctggccaagccttccatgatttaaaacaaaatgaacccgttattatttattaatactctagggagcgagacagaggtcacttgtgacttcgtttttcgacgcgaagctagcctctgggagcccccgccaagcaataataggcctctagcgttcggtttccggacgttagaggccattattgtactgcgtatttgctttttataaaagtaacttaacttatgtcacagtccctattattttaaaagaacgcctaaccggactgtggtgaaaaacttgcaagctaacttattttttattctcttaattaatatatacgtaaaaatttccctttgcacctcataattctaaaatagtggtacagtaaaaataaaccttaggaggcttagattatgactgataaaattgttacttcagaagaaatgcgacattacgattcttacaccattaatacaatcggtatcccttcccttgtgttaatggaacgagctgcattagccgttcgtgatgaaatcttgcatgcttttccaatcgcgctaaaagatgtggtagtagttgccggtagtggaaataatggcggggatggaatagccattgctcggttgctgcatcttgctggtgtccatgtaacaatcctcaatataggtaatcctaaacatgcgtctgctgaacaccaaacacaagaaaaaatcgcgcaatattatcaaattcccgaaacctctgatctcgctgtccttaataaggcaacattaattgtcgatgcaatgtttggaatcggaatcgatcgtgcagtaaaaggagcttataccgacgcaattaacgccattaataacactgatgcagttgtcgttgcagtagatatgccatcaggaattaatactgatactggagaggtaatggggactgccgtcagagctactacaaccgtaactttcgcctataataaagttggcttaaccaagaatgccggaaaagattacgcaggaaatattgtcgtcgcaaatgatatgggaacctatgcagtagactgattggaatattatttaccgagccgttttactattaatcgctgaatattaatattattataataagtaacgaacgtttcagtgaactaatttggaggtaaataatatgtcagaattaacaaccaaattatttatagacctaaatttcaagaataagttagccactggactcaaataaataatactgaccaattgattattggttgatggagctgtgatatctcttggtagaaggccttacgatagatatccattgacgaatgtccattaaacatagctcgtggatagtgattcatccaatcattagtcgctatgatctgagcactactatagttatttatagcttcacctttggtaatctccttgcggagaaaccggttattgatctcattggatccacgttcccaaggggaatacggatcagcatagaaaacatgatcgtgaacttgtgttaactcactaaattctgaaccgttgtcagaggttattgtcttaaagatgcgatagtaagcatctgtgcccattttctggcgtaaatttataaagaactgatttactgcatgcgcagttttaccagcaattttactcgtgatattaactcgtgaaaggcgatcagtcattactagtacaacactgtcattaccgtttttctgtccctgaactgtatctagttcccaatggccaatttcggaccgttggtccgcagtttgaggtcgttgagcaatattaggacctaagcaccttttagcttgcggatgagttcgatgatgcttacgtttaggcttttcaaagaggtctaaattggacgtacgaagcacaccctcattaatccattgatataaagttacaaccgactttgggatcagggtgccatcattcattaaatctcgagccttataaataaccgcttgtggggagtaatggtggtcgtcaaactcaccaagcattagctgatcagctaatcgtaaaaattgctttgaagaataatataagcgacgacgaccagaatggcggtgatgttcaagatatgtggcctgaccagcttcataactatagatgtagtaagaatattcgtaaatcttaccattagatttttgacgacgaagttggcggaccgtaccacggttgagctcgttattaattgtttgatgattaactcctaattggcgaccaattgcgcgattggaaagtccttgcgactttaaagtcgcaatcatcacacgttcttctttagtaagatgagcattctttttatgagtagtcaataaactagtagacatggtatcatttaagtgcgtcatttgacggacatcctttcatataggtttggttcacttaatatgatacctgatgtcacgccgaatggcgttttttatttaccaccaactgggtggctaacttcattctataatccaccaattatttatagatgttaaaaattttgaaaaataccaatcaatgttaaagtgccaagtacacattgaagaagaacgtcatggtgattattgcttaccgggttttcctgatcgtcacaatttccaccgccttctccggattttacgtaaacatgatgacggtttaactagcaaacaactaatttatgacttcgattaccggccaagtgacctcgaagatgctactaaagcattagtaacaaacaatttgtcaactactaccccaattaacgaggaagactacaaaattcaacttaacactgaaggtatcgaagttgctgataatctgctaaagcgccgtgacaaaattgctgaagctgcttaccacacattaagtgaaaatgaacaacgagaattagaccgtcttgtaaacaagctaatagaggattatgcaaaccgcgacgtaaattacaacgcccttggaaatatttgccgttaaaatataatatcctattcaaaaaaggcagaggctaagagaatttttttctatgatcccttagtttctgcctttttagtagcgacaagtcttattaagaaagtactttcccgctcactttcaatttagttattttaaatattctgctggatttgctacaaaatcgctaattttaatagttgttgcatccttagtagcagcattctttaattggaaagttccttcttcaacttcacgagcgccaaacactgcaaagtacttcgcattacgacggaaagcttctttgatctgcttaccaacttttaccccactgtaatctttgtcagccacaatcccttgctgacgaattttactgaggacttcaaatgccatttcatccccttgctgatctgcactagcaaagaagacatctagttggtcttgaggagcaaatgcaggattttcttcttggagtaagagcattaatcgttcaacacccattccgaagccaattccaccttcttcagggccaccaagttggctaatcaacccattataacggcctcctgcacaaacagtcgtgtacccaccaccaaatactggtgagtctgacataatttcaaaaatagtatggttatagtaatctagaccccgcaccatattggtatcaatttcaaaatcaattcctaatttatttaataaggcctgcacttcgtcaaagtaagcttgtgactcttcatcaagataatcaaggattgatggagcttctgcaacaatcttcttatcgccttcatctttactatcaagtacacgcaatggattcttatataaacgttcctgagagtctttactcaattcatcatagtgaggcttcaagtaattaattaatgcttcacggtaatcttcacgaacttttttatccccaagagtattaataaccaatttaacatttggcactccaaactttttaaagagcgccattgccattgaaataacttccacatcaatctgtggtgactcattgtttaatgcctcaaccccaatttggtggaattcacgttgccgccctgattgtggacgttcataccgaaacattggccccatgtaataaactttataaggtttaggatattctggaccatagagcttattttctacataagcccgtactactccagctgttccctcaggacgcaatgcaatatgacgatcacctttatcatgaaaatcgtacatttctttttcaacaatatctgaagtatcgcccacattccgtgaaaaaacatggtaatcttcaaacatcggtgttcgaattccgcgatatccaaactggttaaaaacttcgcgcgcattttgttctactttttcccaaatacttgtagttcctggtaagatatctgcagttccctttggcttttgataatccattaactgtgtttcccctttcgttacgtataaaaacaaaagccctctaagaccttaacagccttagagggcgatattcatcactgttccacctctatttcacagtaacctcacagtcactgcctcatggagttgcgttaactcctgatgataacggaatcaccggaacagactactaaaattcatcctttcagctagtagaggtggatcatgtctgctcccagctctcaactcaactggatctctgtcaattacacaggcactttgtttctacgtcaatgcttttataatacattagtgattttaccatagcttacagattttgggtatcatttatctaaattaagccgccgttgaactcggtgtaaataccataaataaagacagataataatcagagtaccggtcattagacaaaagactgaaataaataaaaattgataacttcctttttcaatgacaaatccaccgtacaatggaccaatcgcacgtccaaccgacatcataatattaagcaatccttggtaatgcccagcttcgtcgacattagtcagttgagcaatccaagcaggtaggccagcaaaactagtcatttcaccaattgttaagattacaaaatcaataacaaatgctgtcaaagtccgagcaaaaattaacaggaggaaagatagggcaaaaataaagattcccacaataatttgcgttgataaacgaacatagggacttaacttattaacaagtggttgtccgataataattagcaccccattcaatgtccataacatactataggcatagaatggaatccccatgtttgtcatatggactgccattacactttcccataaggaataacttaaatgaaccgtaatatagtttatgagaataaaccaaaccaagacgatccatcgcgaatgcaattggcgggaaacatgatagtgttcttggatctctgaattatttttaattgcatctacagccacattaaatgttaaaacaactactagcattaacaaggcataaaagattgttgctacagcaaaaactaccactacactaatcggtaaaagaacacccaccagcaacgttccaatcacaactccgatattaaaggccatataaatataattaaagacataacgggaagaatgatcactgaccaacgtcccataagaattaacaatcgtggcattgattccatccccaaagctgttaattgtaattaggacagcataccatggccaatcatgaataaagatcaataagaatattgctagtgttgagaggctaactcctaaaatagctgtttgatattgtttccaatggtcaaataaccaccctcccaaataatttcccatcatcatggcaatggacattattaacatcacaaagccagcagtcgtcagagtttggccaaggtaattatgaagatacatagttgtaagcggccataaaaaagctgcccctgtgttgtttaacagacttgcaagggcaacccattttaattttaccgtttgctgttccattttaacgttcagataccatatcagaggaaggtacacgtaaaagcgtataggttacagcactatgatttgcttttaaccctaaaccattaatagcagtatttttatactttacatccattaccgctgcaaaagcatggcctgttttggcatcctctttttccaattgctttttatcccatggcaaagcactcgcatctaaggtaactatccgcgatccatcagcaaccgatccataccgtgaatttgttgtatatttatcatttccagcccagtacgtatacgacacaattgggtgcttgccgcttttactacgcgtcgctaaaacataatagaaatcatctgacttatttcccatttgaagtggacgataagtgattgaagtctgtgtttgttgatgattattaatgtcaactggacggaaaaatgtgagatatgacatcccccgagccaacataacgagacaactaataagatcacataacgaatcactaaatttaatttaaatactttttttgtcttcgcaatcagcattaattgtttaacacggatatagtggattacataacaaaaaaaggcaattgcacatatccacgatagccatcctagccaattccaactcataattttcaatactccattctctaaattatttactatgattatcacacaaattgattcacttgtcgttaaatcttaataacaaacaaataaatttaataaaataactacaaggataagttcaaactgtgctaaactaatttttggtaacaaactgtgtcttgatttagaataagagataaggttagtattatttaataatatacctactaaggaggaatgttttcatggacaatttgagtgagcttgctcaaggattgattaactttgagcgcgaaaatgacttaaatgataatgaagttgctttcggcagtcatttatctgttgaacgaattcacgaaattaaatcatccaatactccagtaacttcagaagaagtcgaattgcttcaacggttcatgcaaagtaagtaacattaccattcataccattgtagcaaaatcaaagctaaatattttctaaagcagaactaataatatttctctgctctaatctaaaaaggacctagaagaaaacattactttcttctaggtcctttttctgcttattttggttgataaaattcaaccggaacaagtttagtttctatcttttcatgaggtgtttctattcgcttcattaaggtttcaattaattcttgtgccaacaatggaattggttggattactgttggaagataaggcgctacttttcgaattaattgcgagccatcataacctgtaataaaaaagtctttatttatttgctttcctgcttggtagtaaagattgctaatcgttaatgcttgaacatcattagaagccagcaccccatcataattaccaggaaacgtagcctcaagatccaaatgttgaatagctaaaggttcaaaatctcgtttctgtttattcaaaaaatcaagtgccccttgaatccgattgatggtaggtgaaacagatgtatcttcatccacaattaccgccaagtgttttacatcatgttctaccaaatacttcgctgctaattcacccccgtggtaactatcagctgcaacaattgggatattatcggcaagatatctgtcaaaagaaacaatgggagcagtaagttggtgatattcctctatccccagattatgagaacccgaaataatcccatctacttgatttgccatcaacatatttaagtattcatgctctatttccggattttgtgccgatgatgcaataattgttttataaccctttttaaataactcatgttcaagctcatttgctaattctgcaaaaaatggattaattaaattaggaaaaattaagccaacaaacttagatggtttcccttgcatcgcccgtgccaaggcatttggttggtaattcaactctcgcatcgccgcatggaccttatcaatcgtcttttgacttaaagaaccataattatttattactcttgaaacagtagttactgagacccccgctaattgagcaacatcttttaacttagcaaccattctaaaactccttgattaatttcgtttaagttattccattattatagctcaccacatttgaacaatcgacggttactttaaatataattttaatcgctattttcacaaaaatgtgttctattacatatgtttaatttatcatttatctaaaaatatttttcatttgataaaacatgttttgtgaagatgataattattgattttatgatattttctccccagttttaaaggatttcacttgttttttaccttcaaattaaattgacgctaaagagaattaatgctagtttataggtagttgaatctttagaacttcttaaactttttgacctttttgatattattttaatttatgaaataattaataagccacttttaggagtaatgtttaggaatttcaaatataacttaaggagtccctgccaatgaatcgtcaatctaataatgatccatcaacccattttaaaatgtacaaaagcggaaaaaaatgggtcttcgctggattaactgctgttaccttattaactgctagcggcgctgttgctcatgctgatgatgcttcagtttcttctgcagagcctgccgccgctactactgccaatacacaaaataatacaaatagtaccgctgattcttctgctgccactcaaagtacatcaaacagcgcctcaacaggaaatagtgctacttctaatgccagtcaaactgttgccagccaaaccgcagctgattcagctttagcacaatctgctgaagctaaacaagctgctcctgctgctccaaaggctgctagtgccgttgctacatcacaagagaactcaataacagatttaagcgccctccatttcagtaataacgcttcacaacaagcattcatccaaagtgttgctcctggtgcaatccaaggatggaatgaatacaaagttctcccttcaattacagttgctcaggctatcgttgaaagtggttggggccattcggccttatcaacccaggcccataacttatttggaattaagggttcctataatggaaattcagttgtaatgcgtacacgggaagtttatggtggccggagcgtttacgttaacgccaatttccggtcctacgctaacaactccgaatcagttactgatcatggtcgctttctcaacgtaaatagtcgttaccgtaacttacttggcgatactaactatgcatctgttgcaaataagcttcggcaagacggctatgctaccgatccaagctatgctagtaccttaattcgttttgttcagacatataacttaaatcagttagatgccgttgccctttctgggaaagttgttacgaataagcaaactgaaagtgctcaaactcccgaaactaatgtaactgtttcaaacactggatactacacggttagaggcggagacaccttatcacgcattgccggacagtttaatacaactgtaaataaactcgccaccttaaatgatatccacaatgttaaccgtatttatgttggtcaacggctcttggttcgtcaacctgctgaacaacaacagcaacaaacaacccctaagcgaactgaaaccaatactaccactaatagtaatacatacaccgttaaaagtggcgataccctttcaggaattgctggtaaatttaacaccacttatactcaattagctcagcttaatcatattagtaaccctaatgtgattcatgtagggcaagtattaacgcttcatcaaactacagctcaaaatactactaaccatcaagaaagccagcaaaataaacaagttactactagtgctaatggcacctacaccgttaaaagtggcgataccctttcacaaattgctgctcgttttaataccacaacatctgcattagcttcaactaaccatattagtaaccctaatttaattgaagttggtcaacaattacggattaacaatagtgctagtgctcaaaaaaccacttcacgccactccaatactaacaatggaaattacgtagtccaaagtggtgattcattatcaaagattgccgcttatcatggcttaaactggcgatcaattgcagctaaaaataacattcaaagtccatacacaatctttgttggacaacatttatcactttagtcaaataaccattaaattattatatgatataaagcaagaagtataagaaaatctatgcttcttgcttttttgttttaaaaaaattcttttctgttctagaataaaggtaggcagtttattattaatattcactaaattactattagggagtttatagaaagtatgtgatatttattgtggtagaccgttggacaacagatattccaaatgttaataaaatcagtcaattatttaaattactagggaatcctaaaagattacaattattatatttgctgattcaacattcaatgagcgtttcagaaattagtatgaagttgaactgggaacaatcgggggtttctcaccagctgcaactattgagaaaatataatttagttcaataacggcgagaggggaaaaccgttatctatcatttagaggatccgcaggtaatgaccttgatcgctgatgtattaagtcatgcagaaaaaatcatccaataatttagtgaatattctttgggatccccccattgaaataaaagaaaggcgtttagaactcatcctaagtcaaacttagacgatgacttctaaacgtcttttcgttagttaataaacttaatttctaatcgttcatcttccaaaactccttttacaatcaatgacttaccatcataaaactgatgcttatctaaccaaaatccaagatgggcgtgactataaaacttaaaactataccgcattgcattattcagtttactaacctgcaacacaccttgtgagccatcggaacaagtaatattttgtgattgattattattatgaacataaattgttgtcattcttctcacctccgtttttattatatctcaattttggactaccaaaaatatttttaagcaaaacaaaaaagcaacaacttcagctataggaaagttgttgcttttaaactaatctgcagctaatgcatcgattggattaaggtttgccgcccgacgtgcaggaagcaatgcggcaataaacgaaattacaatcgcaattacgattgcaaagattacatttccaacagtaatttgtacaatattatatttaatcaagccatataaagcgtggttaataataaccgttacaactgcaacaattagcagtgcgagaattgcggaaaacagtccaataaagacggattcagacgtaaataatcggcgaatatctttttttcgctcacctagggctctcaaaataccgatttcctttgtccgttccgaaactgacatgtacattgtcacaataatcattaatgcagacacaagtaatgaaattccagcaattgaagcaagaaccgtggaagcaagactaacataagtattaatggttttaaggattgacccgactgtaatcgctcctaatatccgtttgttattactaccacgaagattatcgatcttattcgccactccttgaacactgtcaagatttgttacattaacggttgcaaagttagcagcagtagaggcattcgctttttgaagcagcgcacgcatagtggaataagtaattgaagttccagcactcgcgccttctgtaatccctgccaccttgaagtttccagaaacgggaactggattattattggcatctatccatgtaaaggagagacggatagttttaccaaccatttgcttataatttttagcacttgataattggattgcttgttgctttgtaagaacgatttcaccattcttgggtttatgcccctgtttaattgaatcactagtaattgccttactcgaggtacttagtgaagtcccactttgcttttttccattataatcaagctgaaaggcgctcaccataattcccggctggacagacgacacattatcaagctttcgtaaccggtcaatattatggtcactaatcgtcattgattgaggattagccgccatcgtttgtcctaacgatgattgaatttgttcctgggtcatctttttaccagttgtgtttttaaatacggtaattgcctgcggattagcaagagaattaatctgattttgaatgtacccatttatcccattacctaaaccactaaacaagagtacggcaaagataccgattgcagttccaagcataattaacgaattacgccaaaagttataggtcaaatgtttaaaagccgttcggtagctcgccatcgccggtaaaactcgtggagtaatctctgttgggtcttctggaatcggataagcaggacgcaatctttcatcgccgtcaatttttccatcagctaaatgaacaattcgtgtcccattatccgctacttcctgggagtgagtaacagcgatcactagtttcccatcacgagcaatttcgtctaataatgctaatacttctttggtattctgtgcatctaaggctcctgtaggttcatcagcaataataatttgcgggtcacttgctaatgctcgggcaattgctacccgttgcttttgacctcctgacaaatggttcggatgcttttttacttgttcacttaaaccaaccttatctaagagttccaacgcgcgctttcgccggtcttccttagtcaacgttgtcatatccaacgcaaccaaaacattatccagcaccgtcaagtgagaaattaagttataggactgatagatataacccaccgtcgcgcgccgatagctatctagttgcttttcttttttatgatcgaggattttaccatttacgaggacttcaccttcaaagttacgatcaaggcccccaatgatattcattaaagtggactttccaccacctgattcaccaaggatggatacaaattctccccgatcaaactgtaagtcaattcccttaagaactgggaattcctctttgtcaagataatatgatttatatatgttttttaattctaaaaaagccattgcatcctcccctttactatttatttagtctgtttattatagcaaggttcgttatgaaaaaggtttttcgctcataattctttaacattatttatattattggtctggagaatttttacttaatgtaagtttcccatcagctaactcgtaaacattatctgcatattcacgcaaacgtaaatcatgggttacagcaatcactgcttttccttcctttttagccagatcttgaaataattgccccactgtctttactaaattactatctaaggccgctgttggttcatctgcaagaattatctcgggattggtataaagggcacgtgcaatcgctacccgctggttttgacctcctgacaattcagaaggatattgcttgagcagcttctttattgcaagcttttccaataattcatcaaaagcttctgatgagacgttcccattcttctttatgcgatcaacaagcttaaattgatccgccacatttagatagggtaataggttatacgactgaagaataaaaccaatcttctgtaagcgtagttcatcacgttttttagaagataatttctcaatatcaattccatcaattaatacttttcctgaagtaggtgtttgcaaaccgcccgcaatcgttagaaaggtactctttcctgatccagaaggtcctaaaattaaatttagttctcccgctttagcagaaaaactaacatccttaagaacatggacacggctaattccttcgccataatatttgttaacgtctactaacttcaattttgacataacatttgcctcctcaccttaatttaaggcctgtactggatcaatcttaataatcattcggactggtaataacgaaccaatcattccaagaactattaatcccactgccattaaactaattagtggccaattcataataactggtaccgacattggaatcgctacacttgtaataagggttaaaagaatcccgccaattactccacaaaccattaggaagattgattgagtaactgtcgcaataattagatgacgagcaggaattccttgagcgcgcataactgcataatgacttattttttgcatggtaagaatatataagaagaccgcaattacaattaacgaaattaccattaagaagccaatcataaaagtaaacgtattattttgcgctgaatatcccggtagcttattaatatattcgttaacagtgtagtgttggagatcagggtaggtatttttactaagcttattgtcagaaaagagtccgctagcaacggctgaactatttaatcctctcagttcccgccaaactggcaaactaccatatataacgggggcaacgctaaatttagcatcattaacaaagccaacaattttatatttctcattttgagaattgattgttactcgatcccctaaatgatacccctttttgcttaaactcttgtcaacaacaatttcgttatttcccttagcttgacggccacttgtaatcttaatcttttcccgggaaataaattggtcaggatctaaaccgataaattgagcactttctttacttgctcctttttctttaagaactactggtgcctgaccaacaagagcaacattcttttgatctttaccagatagttggtcacgagtaataattgattgtccaagattatcattactatttttatttagaaaaacagtttccgtaccccactctttaatggcggcatcattttcattttggagtcccaacatcatccccattaggaaaaacattaggtaactaattaaaacaatcatggcaacaattaatccataatgcagcttttcatgtttcatttcttttagtgctaaaaacatattataacctcctactgcaacaatgcagtcagtgccttggagagccgttcaattgcttcattttgtttatcaggttgaagaaggcaatccttaatcgtttcatgactcaaaaccattacactccattcttgagcactatgaatcttaatttgcggctgcgtattatcacgtaacaatccttcatttgtttgaaagtgcaaacgcataaaatcacggtacttacttccgttgatctcatcaacaaaagctttaatctgattaacataatcactcgcagctaaaatatggtttgcacgggtaattggtgtatgaatttctaaaattgccacttgataaagatactgatatgcctccgttaaatctgtaaaatatttataaaatgctcctctggcgattcctgcttgttttacaatccgtgcaacttgtgcacttgctaagctatgttgactaaattctgttagtaatgcattagtaataagttcttttttctgtagatttaaattttcaaatgttgtacttggcatcttaattcctccaccgcatcgtgacaccgtgtcactatgaatttattttatattatcgccaaagtgacaccatgtcaattactagataaaaaaagcgaggcgaaaaattttttgcctcgtttttaatatatttaaatttttatcttaatctagaattaagcttcttcgccgccaaccttaacaacagcttttgaaaccttacctaatttaccactaacaaagtcttcaacaccatcaaggtctaattcgtgtgagaagagtggtagtgggtcaacaacaccagaagaaagaagtgcaattgagtcttcaaaagtgtaagggttaatgaaggccccttgaattgtaagttgtttttggaatacatcgtaagtgtttactgagaacttgtcatcagggttaccaacaccaaacattaatacttgagcaccacgagctgcagctgcaagtgcttgttcttgagtagctggcaaaccaaccgcttcaacaacgatgtcatatgcatcagcaggaatttcttccttagtagtgttgatagtcttaacgccgaagtgcttccggttgttttccaacttttcatctgaacgaccagctaaagtaacttcgtgaataccacgagccttcaagatttgtgcaaataattgaccttcaaaaccatcacctaatactaaagccttttggtatgggtgagtttcaagtaagtcaacaccgtgcattgcacatgaaattggttcaacaacggcagctgcctttaatgaaacatcatcaggaattgggtaaacaacttttgcaggagcagtaaagtattcttcaaaaccaccgttacgggtaacaccaacagcatcaaggtgttcacataattctgggcgttgagtccgacaatacttacattgaccacagtagatgttagggtcaacggttacacgatcacctggcttaacgttagtaacttctgaaccaacttttgtaactacccctgagttttcatgacctaaaacgataggaggaacagctgatgcagatcccggaagaccggcatagagcgctttatcagtaccacaaataccagcgtaggcagtatgaattaagacttcatcaggcttaatttcaggttctttaatatcttcaatttcgagttgttttttacctgttaaaacaagtgccttcataattaaaatacctctcttgtgaattttatcatttgtcaagtgatagtatagtgtgaaaacgccttaattgtcaaacgtccaacaattatctcacattcttttcgccatcataaaacgttaaactcagcaaatccgaacctaaataaatcccggtatagaagcattttctaaaaaagtgcaatttttaaatatttttttcttcactaagtttatgctatttttttgttatcacataaatggttttactttcattttttaaattacataatttcacaaggctttttatcctatttagcgttttacatcaagaaataaaatgtttctacatataaagtaataaattctaaatttatatagaaaatttctccaactttcagaaagcgcttaactaccattaggcacgccaaaacttatctccaaccgctcctcaaaatcgcccaaatggccgttataacggctattttccattgcaggatatatttttttatgttaccctaacaaagtattcgaacttagttaattatgatttccaatctaattaacaaaactcaaacgaaaggtggatttggcgtggacgacacaaagaatcaacaccggaagcataaacttattgaatatgctaacggtaaatcactagaggaaatcaacggaacagttgaagttcctcgtggaaaaggcttctggcgaacattattcgcttactctggtcccggtgcattagttgctgtgggttacatggatccaggtaactggtcaacttcaattactggtggacagagtttccaatataccttaatgactactatcttgatttcaagtttgattgcgatgttgcttcaatacatggcggctaaactcggaatcgtgagccaaatggaccttgctcaggcaacacgggcacgtaccggtaaagcattaggtattatcttatggattatgactgagttggcgattatggctactgatatcgctgaagttatcggggctgctattgctttaaacttactgttccacattccgttgatcccatctgtatttattactgttcttgatgttttagtactgctattattaaccaagatcggattccggaagattgaagcaattgttgcatgtttgatcttggtaatcttgtttgtttttgcttaccaagttgccttatctaaccctaactggggtggcgtatttatgggtctccttccatcagctaaggcaattgcccaacatccagaaattagtggtattactccattaactggatcattaggtattatcggtgcgactgttatgcctcacaacctatatctccactcagcaatttctcaaactcggaagattgaccacaatgatcttgatagcattcgtcaaactgttcgttttactacttgggattcaaatatccaattatccttagcatttattgttaacgcccttcttttaatcatgggggttgctgttttcaagactggtgctgttcaagatagttctttcttcggtttatatgatgccctgaataacacttctatgcttagtaatccaatcttaattgcggttgctaaatctggtgtattgtcaactttatttgcagttgctttacttgcctctggtcaaaattcaactattactggaacattaaccggtcaagttatcatggaaggtttcattcatatgcggatgcctttatgggcacgacggttagttacccggattatttccgttattccagttattgcttgtgttgctatgacgagtggtgagaataccatccaacaacacaccgccttgaaccttttaatggaaaattcacaggtattcttagcttttgcccttccattctcaatgttgccattattaatgatgactaacagtgaggttgaaatgggtgaatttaagaatagtggctgggttaaggcttgcggttggatctctgtaattgcccttaccttcttaaatctctacaaccttcctgcaacttatgaaggttttggtatttgggcaaaagggacatccgatgttctcgcatatatcacgattattgtcattcttgctcttcttatctggacttgtgttgaactctacaaaggggataagcgctttgctgctgaaggtaaaggattcggacaacgtgaagctcaaatgaaagattcagctgtagaagattaaaataaaaacctggaagcaatgctcatgtacggtaaagaagcaagcaaccgaaaacaatagatagaccgccagcactacactattccgaaccaaagaccaaaagataagcattttgagaaaatctaaacttttggattttcctacaatgccgactacggcggaatccctcccactccttatatatttctttctgtatacattaaatttgtatttagtaaaatgcagacaacaccacggatcggcttttggctggacaattccaaccaaacaccgcagcagacagtagaaaccattctgaacgttaggaagccggtatgattgttacatataaggggaagaaaaatttcttttagatacttgttttcctaaaactgatgtgatataataattcaattccagaaaaggagtaaaaaatatgcggcaagttattcttaaataaaactataatcaaatagtgggaacaaaggattatgatagtcccttttgtaggggcttagttttttgtacccaatttaagaatacttttgccttatcaattttgacatatccccaaaaacagcactcacaaacaggtgtatgctgtatatgtgtatgtccgcaaattatcatccccagtggtaaaagtattttactgctggggatttttatgcccttcggggcagtaaagggaggacaatcacatgaaaataatcaatattggaattcttgcccatgtagacgctggaaagacgaccttgacggagagcctgctatatgccagcggagccatttcagaaccggggagcgtcaaaaaagggacaacgaggacggacaccatgtttttggagcggcagcgtgggattaccattcaagcggcagtcacttccttccagtggcacagatgtaaagtcaacattgtggatacgcccggccacatggattttttggcggaggtgtaccgctctttggctgttttagatggggccatcttggtgatctccgctaaagatggcgtgcaggcccagacccgtattctgttccatgccctgcggaaaatgaacattcccaccgttatctttatcaacaagatcgaccaggctggcgttgatttgcagagcgtggttcagtctgttcgggataagctctccgccgatattatcatcaagcagacggtgtcgctgtccccggaaatagtcctggaggaaaataccgacatagaagcatgggatgcggtcatcgaaaataacgataaattattggaaaagtatatcgcaggagaaccaatcagccgggaaaaacttgtgcgggaggaacagcggcgggttcaagacgcctccctgttcccggtctattatggcagcgccaaaaagggccttggcattcaaccgttgatggatgcggtgacagggctgttccaaccgattggggaacaggggagcgccgccctatgcggcagcgttttcaaggtggagtatacagattgcggccagcggcgtgtctatctacggctatacagcggaacgctgcgcctgcgggatacggtggccctggccgggagagaaaagctgaaaatcacagagatgcgtattccatccaaaggggaaattgttcggacagacaccgcttatccgggtgaaattgttatccttcccagcgacagcgtgaggttaaacgatgtattaggggacccaacccggctccctcgtaaaaggtggcgtgaggaccccctccccatgctgcggacgtcgattgcgccgaaaacggcagcgcaaagagaacggctgctggacgctcttacgcaacttgcggatactgacccgcttttgcgctgcgaggtggattccatcacccatgagatcattctttcttttttgggccgggtgcagttggaggttgtttccgctttgctgtcggaaaaatacaagcttgaaacagtggtaaaggaacccaccgtcatttataaggagcggccgctcaaagcagccagccacaccatccatatcgaggtgccgcccaacccgttttgggcatccatcggactgtctgttacaccactcccgcttggctccggtgtacaatacgagagccgggtttcgctgggatacttgaaccagagttttcaaaacgctgtcagggatggtatccgttacgggctggagcagggcttgttcggctggaacgtaacggactgtaagatttgctttgaatacgggctttattacagtccggtcagcacgccggcggacttccgctcattggccccgattgtattggaacaggcattgaaggaatcagggacgcaactgctggaaccttatctctccttcaccctctatgcgccccgggaatatctttccagggcttatcatgatgcaccgaaatactgtgccaccatcgaaacggtccaggtaaaaaaggatgaagttgtctttactggcgagattcccgcccgctgtatacaggcataccgtactgatctggccttttacaccaacgggcagagcgtatgccttacagaactgaaagggtatcaggccgctgacggcaagccagtcatccagccccgccgtccaaacagccgcctggacaaggtgcgctatatgtttcagaagataatgtaactgcttccagttttttatttttgtaacgattctttcacaaaatgttcatacttgaacggtatagtatagacaatccctaatataaataaacccctatttttcttctatactatccccctcaaaatagctatgaagaaatacgaaaagtggtcggcccataatgagtcggccattttttaatacatctaggctcaccatggtataataaggaactagatatattactcattaagtatgaggtgaaatcattgaataataaagataataatcaaaataataataagcggcgacctactcgggttgagctttatgacactcctaagccaggaaaagaaaagaaaaaacgttctttctttaatcgtcagcctaaacagactacccctaaccataaacataagacagcatcccctaacaagaaaaagaatccatatggaatttcacgtcggatgttcaaggtcattttaggctgcctattagttatcttaattgcaaccattgttattttcttagttaaacaacaggaccctgtcaatgttgatagcaatgacactactgtctccacaagcacttcatcacgcaagaagcataaaaagagcagcagtagcagtcataagcatcgttcaagttccaatgacagtgatgacaatgatactcaagatacttatagtatttcaactcctagtcgttcggataacacgcctcaatcaagtcatccaactaaccaacaaccaactactaactcttcttcaactccacaacaaaaccaaccatcgcaggaagaacaccatgatcaaggcaacagccaacaacaatctacttcacaaccagcaagcagcaattctgggtcacagcctaatcaaagttcgcaaagtactagttcccagtcaaacccgcaaccagttcaacctcattctcaaaataatcagcattaatttggaataaaggggttgtcaattaaagtgggcgtgctataatcaagacaatcgattgaaggatatgcaccttcaaagtcctctacagagagtaagtgccttgagtggaagcacttgtgagtgacaatgatggttgtaccaccttcccttattattagccgagataaggctagtcggatcgtgtccgttaccgcaccttagagaggacattactagtgtgtcctaaagatgggtggaaccacgctaatttttgttaattgacgtccctgatactttcaacattgaaagtatcagggacgtttttatttatattaaaggagagatttctatggctcaggttgctgttatgtccccagatggatcagttaagaagatcgatcgggattcacaagaaagtttagaagcattacgtaagctttctgcattaatgttaaaggctgcattaaaacaagaatttaagggtattcgacttggtgaagctgtcgctgacgaagatggtttccacgttgattctgataaagataatcaacaagtttctgccgacgaattaccagctcttgaagacgtaatcaagggaatggcaaagaacgatgttaaggtagaatttgttgaagtacctgtagaggaagcacttgccgaagtaaaagatgatcgtttctcaactgaattgatcaatgaaaatgctaaagacggcaaagtagcaatgtaccaacttggtgatgtcaaagctgttgcagatgatgacattcttttatatggtaacgttgttaaaaacttacgccttctttctgttgctggtgcttactggaaaggtatgtcttcaaatccaatgcttcaacggatttacggaactgtcttctacaagaaggacgcattagaagaagacttaaagaaacgtcaagaagctaaggaacgtgaccaccgtgttatcggtaaccaactcgacctcttctttgttgatcctaaggttggtgccggtttaccatactggttaccaaaaggtgctactattcgccggacaatcgaacgttacatcattgaccgggaagttgccgatggttaccaacacgtttatactccagtcctaatgaatcttgatgcctacaagacttctggtcactgggaacactaccgcgacgatatgttcccaccaatggacatgggtgatggcgaaatgcttgaattacggccaatgaactgcccaagccatattcaagtttacaagcaccatattcgttcataccgtgatctcccattacgaattgctgaacttggtatgatgcaccgttatgaaaaatcaggtgctctttctggtcttcaacgtgttcgtgaaatgactttgaacgatggccacactttcgttacccttgaccaaattcgttctgaattcgcaaagattttgaagttgatcatgagcgtttacgaagactttgatattactgactacagcttccgtctttctcttcgtgaccctaagaacgttaagaagtactatgctaatgacgaaatgtgggaaaaatcccaatcaatgttgaaatcagcaatggacgatcttaaccttgattattatgaagctgaaggtgaagctgccttctatggtccaaaacttgatattcaaactaagactgctcttgggaatgacgaaacaatgtcaactattcaacttgactttatgcttccagaacgattcggactttcctacgttggtcaagacggtaaagaacatcaaccagttatgattcaccgtggtgttgttggaacaatggaacggttcatggcttacttaacagaaatttacaagggtgcattcccaacttggttagccccagaacaagtccacattatccctgttaacgaagaagcccatggtgaatacgcagataacctcgctaagaagatgaaggctgctaacattcgggttaatgttgaccaccgaaatgaaaagatgggctacaagattcgtgaagctcaaacacaaaaggttccatacactcttgttgttggagacgatgaaaagaataacaatggtgtatctgttcgtaagtacggtgaaaaggaacaaaatgaaatgagtcaagaagcatttatgaatgaaattcttgaagatattgcttcttactcccgtgaaaagtaattaagactaaaaatggctctatcacaactttgtgaaagccatttttttgttttaaattttttgaaagtgaaatttttagcataactttaatcaccaaaaataaaccgttttcgaagtgttcgtgaagttttggacaacctaaaattagtaattgacactattactcaaaggctttatagtaataaacgctcgcttctgagccactaaatatattaattaattattctaaaaacaaaaactatttattttggaggtataagatatgtctactatgaacgatttatttaaagcaatgggtaaagctactgaagaacatcatgctagcggtctttcatttgaagctaaaactgatgcacctgctggtattggtcaaggtatccttaacgttcgcaagtaattttaaaaggtcatgattaggaatttcccgatcatgaccttttttatttatccttaatagccaaagcaaatataaacataactaaccccagagcaaatagaacacttaatgaagctgcaccgaccgtcgatttaccagtccattgagtaacgacttcaacaataaaggggccaagcttcccaaggatattatagaaaccaaaaaattcgctactggcatttttaggaacaaggcggccgaagtatgatctactaagtgcttgaagtccaccttggcttgtcccaactaaaatagctaaaatccaaaaatcagtcaaagtttctaaccataaagcataaagacaaataaagaaataaacgataatgcccagcataataattcgtctcgtagaaaatctattagcaagccaaccatataaaattgaaaatggaacagcaattaactgaactactaacagaacgaccatcagcatcgtggtttgaattcctaagtctttaccaataaccgttaccattgtaaagattgtatcgacaccgtcaatatagaagaagtaagcaactaaaaaccatgtcaactgcttatattgattaatatgatgcatagttcttctcagacgacgcaaactatcgacaaaaggatttgcaacactgctgacgctataacgttgatgaccattttttaataacggccacgcaaaaataatccaccaaactgtagccaaaactaaatcgggctactccataactgcttaagagaccgctaaagcccttacttagttctgctactaaaaagataataaagacgactactcctcctaaatatcccattccatagccagtcgatgaaacacgatccatttgcctattatcggccacatctgttaaaaaactgtcataaaatagatttcctcctgagtaaccaataattgacccaatataaacgattaaaagtagttgccagtatttagttggaacaagggcaagcccgattgtcagtataattcccaaccaggtaaaaagatttagccagcgcttctttgcatacgggtaatcagctaatgcccctaataaaggcgctaataatgaaataacaagcgtaccaaaactattagcatacccccacagtgctgtcgagtttgctgcactaacaccggcatgatcagttactgctttgaaatagactggtaaaacagcggtcacaactaaaattccataaccagaatttgcccaatcataaaaaatccgttgccattgttgtctcgtaaacttcacaacgtcacctcagtctttaaagattgcatcaattgcttgtccggcagttgaagtcggataatgtaatcctaataatttagcaaatgtcggtccttcgtcaaccaagcgagcatgttcaacagtcgcaccacttttgatttggagaccagcaaaaatagcggtagtgaagtaatttgcttgtgttggcccgtaaccatgaacgccatgatagcgatcgtgagttccaattgattctggatcaactttttcgacaatcgctggtctgtttacctcatcggtgaaatattatcctggtttggcttcgacgaggaatgtgcacttaggatctgccccccgtttgatcgccgctgcgttatcatagattcgctcaaccccttcaacaccagcaatcatttgcttaatttttcctcgatccacggcaccacgagtgtaaatataagtttctccatcgcaagttttagcagtgacttgccagttatttcgataagtgcttttctttccaagagggtgaagaagtccttgttgcgcaaataacatatttaaatgaatcatcttatcaacattaatttgatagtgatctcctaaaatcacaaagtctgtttgcgcgtaagtaccggtatcttttgccgcttgaattatcttagctacacgtttatctagacggtgtaatgcttatttggcttgtggtgatcgaactccataacggtgacgcatactatccatatcaactaagtgaatcaatgttaagtccggctttttattttttattgtatcaaccgcataggctgttacaaaatcgtcaagccacggctgcttaatcccgtgacgtaatttaccgtattttttattcatttcatatagaaataacggactacttgcctttaacgaaaccagtacttgatttgtccaaattcgattaggaaagatttctgcaaggttataatcaatcttactgctagcagtcacaggccacaaaaatgcagcagttgttaagcccttttcttttgcaacatcatagaggggcatcaattgaatatcttttcgataccagaaccagtcaggcgattgccggcgcggctgcaatttagtattgttaataattccatgtacgaccggatactgaccagtaataatcgaagtatggtatgggatggataagttaacgttggaaagattccctcaacttttttcacccatgttcctttttctattaaatctgctaatgttggtgttaattgacgtaattcgtttaggtcacgaaaacctaatgaatctagcgaaataacaatcagcttatgctgtttcatcagttcatctgctttcttttcaaactcattagctattttaaaataaatcattgttaataactagttttgaaagaaattatcaaaaatcattctcatcgtaagcattaaaatttgtatgataaaaaagttaacccacattagtaagccagcgattttcaataagttttaaagtgaaatttgattcacagtaatttttaatgtaaaattaagtttcagttttcagtattttatgaaaggaatcataatcatgcaaaatcagttacccaagggaaaagagcatgagaaaactctcggcctctttgacctttctattctaggtattggcgcaatcatcggaactggaattttagttttaactggaattgtcgccgcggaagattcaggtccagcaattgttttctcttttctgattgctgctcttgctagtggtttaattggtctctgttattcagaattaaccactagtttacccaattcaggaagtgccttttattacgcgtgggtttcaattggtaaatttatggcgttccttgctggatggacgctgattggggtctacgttactacaaccgctacggtagccaatggttggactgggtacgtacaatcgttcctagaagtcctcggagttaatttaccacataaattactggttacgcctgcagctggtggttatgtaaacctccctgctgtcttgatgatcctttctatgacgattattttgacacgtggaactagtgaaagtaaacttgttaacaacttcttggttggtgtcaaaatctttattattgttctatttatcgttgttagtgctcaacatatcaatctcgctaactggcacccatttttaccatatggatacaagggaattttcacaggagcatctgctgtcttcttctctttcttaggatttgatgcattagctacttctgctgaagatgctaaagatgttgataaaaatattccccgggcaataattttatgtttagttatttcaactgctctttatattttagttagtcttgttatgacgggagttctaagttataaagatttgaatgtctctgaagctatgtcgtatgttcttttagctaagggtcataaatacgtggctgaaattgtttcacttggcgctgttttaggaattatggctgtcgtctttgcattcatctatgctggctcaaatatcatgaagtcaatgagccgaagtgcctttcttcctcaaggcctcgctaaagtcaacggcaaaactcaaagtcctaatcgtgctatttggctagtcggacttctttcagctgtcctagctggagaattcgatctccattatcttgcattaattgccaatattggatcattggttgtctttgctttaatttcgctcatcgtaattatcttacggtaccgttatccagaattaaagcgaccatttaaggtaccttttggcaacgttattcctgtgctatcagtattaatctgtattgttttattagtaagcatctcacttaatgcttggttaacatacttattgtggctagtagtcggattaggagtttacttcttctattcccttcgtcatgccaacgaatttaatttccaagatgaaagtgatatcccaggtaattaaaatttagttctaaattatgatagacctctacattgatccagaatgttagaggtctattttaatattatttagcacttcgattctgacgagttgtttccgctaagtggactaaattagtaacaaaattatgagttttggcttcataattatattggcgacccagcttaacaaagtaaccattgatataatcaacttccactggacgattatgactcatatcttggtacattgaaggataatgatgcggacagccaactttagagacataatttacactttctagctcttctgctcgcgtattaactaattgtacccctgcacgttcacagacatcatatgcttcatcgattaattgccgagatagttcatcagccttatcaaacgccgcatattcacccattgtaatttcaaacatagtacaaagggtattaacgactgaattaaagaccacttttgccatcaacgttcccataaaatcatctttaagggatggattaaagtttgcttttttaagttctgccattaacgcttgtgtcttctcatcaggcttttcagtataattagcccaattagtcgttcccatccctcgttctccaacaaattccacttcgccaggtttggttaaaatagttgctactaaggcagttccagcaactactttttcttttgggaaatacttcaataatttttcaacatgtcccattccattcatcgctgtcatcgcatattgatccttcaagaaatgttcacaacgttttaacatatcatctaactgcatttgttttaattcaaagaaaacaaaatcagcatctgtagcattgtattcttcaggtgtataaacattaacgggaacaaggtgtctatttttatgctcgcgagttacataaacgcctccttgttctttcatcttattgtaatgtggtaaccatccttcaacaaaatcaacttcattacctgcttcttgtaataaaacaccaaaccgtaatcccattgcacctgcaccaacgactgtaaatttcataattatctctcctttttatgactataaaaaagcgtccttagattaaacaacttaacctaaggacgctttttgcgtggtaccaccttaatttgccaacaattcacattattagcctcaaatgttcaatgcttccattaaacacgtcagctataatgggctgatcccaccattaattactaatttcatcatggcactcaaagtgattttcattataagcaggttatcctttttcatcaaccaaggactctctgctaatccactcataattactcttcttttcaacgtgttttcataatcacattttaatttttatctaatttaatactttgggttgtaaatgtcaagatttatttttgttataaattatcttgacatccctatttcatccgcgtattataatgacaactaaatgagagaaagcttagaaaagatgagtaatcttagaatcttattacagagaatcacggttgatgagaggtgacataagagactgagacgaagatggtcttggagcttcacgaattacgagtattttatataagtagttcacgattgacgaccgataaaacgtctgggtatagcttccattagtgtacctattgaggatagtattgtgagatactatcaaattagggtggtaacacgttaattaactattgattaatcaacgtccctaggaaaagtagaaatatttttcctaggggcttttttattgcttcaattcttgaacccatcacgaatagaaaggatcgatttactatgactgaattcactacacgtactacatcaccatttcgttatgacatcgttggaagcttccttcgtcctcaagagctaaaagaagctcgtgcaaaatttgcaaacggcgaaataacacaagcagacttaacagttgttgaagataaagcaattattaatttgattaaacaagaagaagctgccggcctgaaagcagttactgacggtgaattccggcgtagttggtggcaccttgactttttctggggattaaatggcgttaaaaaagctactctaaaggaaggctataaatttgcagatgaagagactcgtcctgaaactgcgcaaatcactggaaaaatctccggcgaaaaccacccctttgtcgaacacttcaaatttacccaagctcatacctctgatggcgttcaagttaaacaaactatccctgcgccagcacaatttttagaagaatttcttcgtcccgaaaatcaagctaatgctaaagaattttatcccaaccaagaagatttagatcatgacgttgccactgcttatcatcaagtgattgaagatctttatgctgctggttgtcgtactcttcaactagatgactgtacatggggaatttctgttaacgcctttgctaacctaaggaaaaaagaccccaatgctgatgtatctcagcttaaagccctgcaaaagcgatttttaaaagtaaacaatgaggcaattgctaatttacccgccgatttaacaattaatacccacgtttgtcgcggaaactatcactcaacatgggctgctgccggtggttatggaccagttgccgacacactatttgctaaagaaaacgtcaatgccttctatctcgaatacgatagtgaacgtgctggcggatttgaaccacttagcaaagtttctgatgataaatatgttgtccttggtttaattacttcaaaatcaggtgaacttgaagataaggcagcaattatcaaacgaatccatgaagctgcgcaattccatccattagataagctctgtcttagtcctcaatgcggcttcgcatcaactgaagaaggaaacattttaacagaagaacaacaatggaaaaaggttgcacttgttaaagaaattgctacagaagtttgggaataatttaaaatgaataatgggagcgaggcagaagtcacttgtgacttcgtttttcgacgcgaagctagcctctgggagcccccgcaagcaacaataggcctctagcgttcggttttgccggacgttagaggccattgttgtactgcgtatttgctttttatgaaagtaacttaacttatgtcacagtcccatttattcttctcccactaaattgccaatacacggtctttatgcggagagtaattaaacagaacatctgtcaaatccaatcctgccttatttccatgatgggtgccatcttgccatgcaggaatatgagttacatcatagacacgattattaattgctacataagctggattcccgttttgcccatcatatttttcaattcttctcttgtaaatgtttttgccataatattccgcctccttatttgatagtgtcaattcaatatcctcactatatcatggaagcgcacacaaaaaaattaataattacctcactttaacgcaaaattatactctattagtattttcttcacaattaatctaatatcatatctaagtgcggaatattgtcttcaaggtaaacatctgaaatcggcttaaatccaaacgatgcgtaaaactctttaagatatgcttgagcttgaatttgaattgtcttatttgggaaaagacgcttagtttcatcgaccgttgcctgaactagctgacgtccgtattcatgtccacgaaattgttttaaaactaatacgcggccaaaagtcgcatgagagctgtccttagccataattcgcgtataacctactaagtctccctggtcatccttcagcattaaatggtgagcttgataatcctgttcatcaatttcttgataaggacattcttgctcaacaacaaatacttttatccgttcttctgctaatctacaccattcttgagcggtcatttcacttagcgtttttacttcaacattcatattaaaacctcctaaaaaataaaagagtactaaccaacttcttcatgtcattgtgacaggccctagtagaagatggctagtactcttaatgtctttaatccggggactaaagacgagtcgttagtaaattattcggtatcagtatacaatggattaatctatcttgcaattagcgatttaataccaagcaggtttatctccgtctgtatttggtttattcacaccaaagttttttcgtgcatatggtgccggatcatcaataatttttgctacaaaattaccaattgactttcgcgagacctcggtacctttaaatggttctccttttgcagtcgtttcgtaatccacttcatccttatctgttaaccatgctggtcgaatgattgtgtaatcaagggttgaattttcaattacatcggcagcactgcgataagttcctaaataactatctttctggccgccacctaacatttcattattccactcaccaaatttacctggaacttcatcatagattccaatcgaggaaatccagactaacggctttacagcatatttttccattaagctgacaatatttttagcttgttgcgtaatttcaggatttcgtagattagcataaactacatctgctcgttcaatcgctggctctaaatcgccaatatttaggacatcccctttaataactgtttcacgattttcatcgacaacattcatattttgtgggtgccgagtaaatagtaataattcatcattgccatttgctaacaatgcatcaattgcgtgtccagcaatttttcccgttgcacctagaatcaaaacttctcttgccattatttctacctcctcataaattctacttttagtatacaattctctataccaattaaaagtaagcacacacaagtaaggtagttacactcaggtaagatatgattgatggacaagtaatcggcaaaattttattttttagtatattttttgccccactggttaattgacctaattattggtaccaaactttttcctacttccgtcaatgaatactcagtcttaggcggcactgtcgaataaacacgcttttgtataatatttgctccctctaagtcctttagttgaagagccaacattctctttgaacaatctggaattaatttttgcaactccgaaaaacgacaaggctcatattcactaatttgatatataattacgcttttccactttccgtttattaacttaagcgtattctcaatcggacaatctttttcgaccattttttctcctttctctagtgaaataaaattcacttcttgtatatttttatttttaagttactattagtaagtaaagaaatgtacgggagtgattattatgaattcacaatttaacagtttagctgcaaatcgtcgttcaatctatgcgcttggtgataatctttcacaaacaccagaagaaatttttgacttagtgaagcaaacaatcaaaaactcaccaactgcttttaatagtcaaacagtacgggcagtcgtattatttggcaagtcatcagataaagtatgggaaatcgttgaggatgctttacgcaaaatcgctaagagtccagatgcttttgaacaaacaaagtcaaaaattgatagtttcaaggcaggctatggaacgatcctctactttactgacactacaattgtgcatcaattagagaatgattatccatcatatgcagctaattttgcaaactgggctgaacaaggcctcggtggtgctcaacaagcagtttggacagcactcgcagaacaaggaatcggtgccagtcttcaacattataacccattgattgatgatgcaattcatcaagtatttaatcttccagctgattggcaattgcgtgctgaaatgccatttggttcaattgaggcaccagctggagaaaaggctcagcttgatgacgaagagatgttcaaattaatcaagtaaacttattattctccatcctcttgaacggtatataattattgtaaacacgttaaaggaggaattttaatggaacggcaacctaaaatgtataatactggagcagattatgctttagcaatcattggtggtaaatggaagtccgttatcctttatctcttagctggtcatccccgacgaacaagtgaactagttaagcagctaggcacctcatataaagtcttgagtgaccagcttagtgaaatgatagatgccggcctcgttatccgaaaaagtttcaatacgattcctccacatgttgaatatcgcttaactcctgagggtgaaaatctttatgctgcccttcgttatttaaattactggggtgaaaatagagcaaaacaaactggtgacattaaaatcatgtgtactgacgaaatgaagcaggtcggcgatgatggtctatgtgtcatcactaaaaaacatcttaatcattggcgccaagaaattgtaaaaagcaaggacaaagatatttctatctaagttcttgcttttttgtgttctttaatctaaaagccaacgccattataaatataatcatgtagctcgcaagaataagatgggtattcatgataattggaaagctttgaatacttgtttttcccaccgaaaacgcaccaaaaattctattaattcctgttgttccagcaaaaataaataaacttccccacattactaattgggaaattatccccgcaattgatgcatagtaataattgacgatcgaagaaatactataattatgggttgctttctcgtagtcatcaattgctgttttacgttctgcaccggcaaagctacggatgataaatacgccaataaaatatgttggcaaccaaaatgttaagagaattccaattgttagcatcactaaattaatttgacaatccttaaaatggaataaatggtgggtttgttttaccaataatcctccaaagacgaaagcaaataagtaagcaacaattgtccaagaatacatttttgtgccatacaaaatgccaataaaaacggtactatacagggtccaatactgaccacaagcaccataaagcattattcgttgccgtaaatgattgggatagtgaagtaatcgccgatggtttacaagcaaggtaaggatcatcgtgatgaggaagattaataaaagagcggttccccattcaagtggtttcccaaagcctaaacttctccctaatcgcaacagtaacattgcgccaagcaaaattaatgctagtaagtaattagcccaatgtagacgaactggcagcggacgaattgcatggggtgttttccaaattgatcccattgcaccaaaagtaatgattaacattaaaacaaaactaattactggcttctttatccacacaattatcccaaacacaatcaaaactataataacttgaaaaagcggcttaagatgatcctgctggggtaagagtcctcgttttattaatcgccgccgctgacttattgcggttggaaatagtcgagaggcaatccctgcccctgcacctgacaaatcccagaagattggttgaaatccaccaaacatccctaaaaagtaaccaataattccgctataaagaccaatccaggccagccgttgataatcgtattctaaatcacggcaaaataataaaattgtatgccggaaagcatagaaaatagcgaagggcaaggcaccaacaaagatatcagactgttctttagtaagggaaatatacagcaaaaaaggcattaaatttaataataaactacagacaccagtcaacttttctaattttttcatttttatttcctctaatgctggtcaattgcactattcagtttctttcgatttactagaaaaataataataactaacgggacaataaatagcattacgggataaaaatatttcacaggtaacgtactatcaacaatcccccgatgattggcccaagcgtcattccaatatcaaggccgagaaagaatgtcgaacttgctaaccctcgttcattatctggagctagcatcattgcagttgattgacaaacggaataaataataccatagccaaatgccattccagcagctgccagtgccatttcaatgttatttttcataatacttaacataataagataaaagattgttgcaaccgtgcttaaaatcaaccatggttcaaaacggacagtatcaaattgggtccgtaagaataatcggctaagtaaaagaactacagcataaattaagaaataagcaccaacagcaatagataagtgacgttgttcagcgtactcaacaatatctgcctgcgttgcaaaatatgggatagcaaataaagctgttaaaagggcaaccgggatagcgtctcgctgaatgattttaatatgaaagccactttgttttacagagtgtgctgccggttgagcgcggttactgacaaactgaattgtgacaacaaccagtaaagccgataatgctgaaatcaccattgcagctcgataaccaataattcgatataagttaattgatacagcgggggcacatgccattgccaaagcgttcatcagtccataaaagctcattgcttcgccaacatgattaaatggaactaaatatgatagccaggttgtcatacaaactgtacataatacaaatcctaatccattaaccaaacggcatattaacaagaaagtgctattaggcgttaacacataacctgcaaccccaataaagcacaatattccaccccaaaaagctaatgaatattttgaaaaacgatcagtcagattaccagcaattggtcgcaaaaacattgaaacaatactcatcattccaacgattatacctgcaaaagcacttgatgcgcctaaatcttgagcataaccgttaatcaatgggttacagtacatattactaaacataaaaaagaacgaagccgccattacgagcacaacatcttttgtaaaaatcgatttttccttcgccatcaattcccctactttctttgcatgattttaattaaattctaattactatcatacaactatttggggaagttaaatgatttcccaggaaataaataaagagattgggttttgtttcccaacctctccgtgtgtacttcactatttatattttactgcaaagaatcccaagctggtagagtaacgggttcactggcagctactttctttactcgatcgctaaggtacttcttattaataacagcctcataagtatactcttcaaaccaatcttgggtcattacaaagtatccgttatcgccattatctttaccccaactgttttcaatcttccatcgtgtaggttgaccatttaccatgtcaaagcctgttaatgtcattgcatgagaaacgacggcttgcttagtttccaaacggtgcttcttatccattacaaaatcaacatcaagcaattcctctcgatgatataattttgcatccatcaagcctcgcttacggtccatttgttggagaacatcattcccaacccaaactgtttcaccagcttgcaactgtttgatggctccttcttgtaattctgcaaaaggaacattaacaaatttaattggcaaaccatcaaccacactatcttgcgctggcattaaataactccgatccatttcatgatcaggagcgttagtaactacaacatagtcacttaagtttgtatcaaagtattcatgatagaactttaatggcgttaagccaagaacttggtggaactttttatcatcatcccgatattcaagatcaaattttgcaggcggttcaccaaatgagtaggctgcaatcttataaacgtcacccatcattcgttcttgtgcttcctgtaattccgttgcactggcattagtttgcaccattacccgtaattcaattgcatctttgcgcattaagctatcaaatacttcggctacatctgaagtatccttcgtattatgtgtgtcaggcattacatattctggaacaacaccatatttctcaataatagaagcggcattagcccattgtccaccatcatttaatgcaaaactaaggtagaaatcaacggttcgatcatgcaaaggcttatcagcagttgcaataatcttctggaaaaacatatttgcccgttcaattcgatcccagaaaaatagataattttgtgacaattcaaagtccttgaacttatattttgttgcaaacttatgacgtaatgtatttaatgctgcaaaagaccagcaacgtccactatgacgctggttggttggcttccccgtcttaatttcataagaaaatgctcgatgaagacgttcgcttgccgttggatcttcactcgcagctttaatcccatttttttgtattgcccgggcaataatttctgcatctttacgtgaatgaaattctttctttaatttttcaaccatttttgaggttaaatcgtgttcttcagtcacaataaatcccttctttgcctaaaattctaaaatgacttatacattattaatgataccgcattttcttcaaaattattgacttaaaagcttttctattttaaacaagcatcaatcctttactgcttataaaaagtaagctaagattgtatttagtaagtcacttttaattataaattatatgaactgcggtaaaattctatctaggaggtcgattaattatgaagaaagtatttgttgtcggtggttcaggccgtgttgctactgacttaattaaagatttagttgccactggtaatgaagttacagctggtgctcgccatccggaaaaagttattaagttaaaccacgttactgctgttgaattgaacctacatgatagtgttgaaaaaatcgctgaattaatgaaaggcatgaatgcaatttactttgttgccggatcacgtggcaaagatttactgcaaactgatgcgatgggagcagttaaaacaatgcaagctgctgaaaaagacggtattaaacgttacattatgttaagttcgctatatgctttacaacctgaaatgtggtcaaaagttccatcattagcttcaattatggattataacattgccaagttctttgctgataattatcttatctcaaatacaaatcttgactacactatccttcaacctgctaatttaactgaagaacccggtaccggtaaaatccaaattggtgaaggctctgcaacttctaatccgattccagacgttgcccagactttagccgatattctacaacacgataatacaatcggccacgtcatcatgatgcggagtggagatacgccgattgaagaagcactagatcaaatttaattttttacaggttgttgaccagtcgaaatagcgtaagattggcctacaactttttctattctaaaatcaggtaatagtttagctaatttttctcatcagccgtataataaacattaaaaacaaattaagaagggaatcttttacatggcaaaactcgaacgcttttataatactttccaacctgaccattatgatgtttttatcgatattaatcgagcaaagaaaactattaatggaaaaacaactatcactggtaacgcgactgatcctcaaattgcaattaatcaaaaaaatttgcaggtcactggtgttcaagcagacggtcaagaattagactttaatattgataatgatgccgaggcagttcggattacccttccgcaaactggtaaagtaacttttactgtaacttataatactaagttaactgattcgatgatgggaatttatccatcatactatgaggttgacggggagaaaaagcaaattatcgggactcaatttgaaacaacttttgctcggcaagcttttccctgtgtcgatgaaccagaggctaaggctaccttcagtctagcaattaaatttgatgagcatcctggtgaaaccattatcgctaatatgccagaagatcacgttgaaaatggcatccactactttgaacccactgtgcgaatgtccacttatcttgttgcctttgcatttggagagctccaaagtaaaattactgaaacaaaaggtggcgttaaagtaggtgtattcgcaacgaaagcgcaccaaccaaaagaacttgattttgcattagatattgctaagcgggcaatcgaattttatgaggatttctatcaaactccgtaccctcttccccattcatggcagttagctttacctgatttctctgccggtgcaatggaaaattggggattggtaacctaccgagaagcttacttattactcgatccagacaacacttcccttgaaatgaaacaattagttgcaactgtcatcacacacgaactagctcaccagtggtttggtgatcttgtgacaatgaagtggtgggatgacttatggcttaatgaaagttttgctaatatgatggaatatgttgccgtcgatgctctccagcctgactggcatatttgggaacttttccaaacttcagaagctccaatggcattacaacgagatgcaactgatggtgttcaatccgttcatgttgatgttaacaatccggccgaaattgatgccttattcgatggtgcgattgtttatgccaaaggatcgcgaatgttagtaatggtccgggctcttttaggtgacaaagcgttacgagaaggtcttaagaattattttgctgctcacaaatacagtaatgcaaccggagctgacttatggaaagctcttggcaacgcatcggggcttaacattggaaaaatcatgaattcatggcttgaacaaccaggctatcctgttgtaacagcaaagattaatgatgatggcgatttagtactgtcacaaaagcaatttttcattggtgatggtaaagatgttgatcgtcaatggcaaatcccacttaatagcaactatgatgaagctccacaaattatggcggaacaagaactcaaccttggaaattatcaagcattgcgcgataagaatggtcaaccattccgtctaaacctcggcaataattcacatttcatcgtaaaatatgatgatacgctactaaacgatattttagatcatgctgatgaattagacccgattacccaacgtcaacttcttcaggatctgcggttacttgcccaaggacaacaaatatcttatgcgtcattaattccattattaaagcaatttaaagatagtccttcagcaattgttaacgccgaactataccaaatagctaatggccttaaaatgtttgctaaacctgattctcctgctgaacaagaactacgacaattctctgatctattaagtaaggatcaagtaaagcggcttggttggttacctaaagatgatgaaagcaatgatgaccaattgacgcgcccttatattcttagcacttcactatttgcacgcaataatgattcaattactcaagctcatcaaatctttactgaaaatcaggataaattagagtctctttcggcggatattcgtggtttagttcttaaaaatgaagttcaaaacttcgggagtgctgaattatttgataaattaatcaaagcttaccaacaaacagcggacgcaagctttaaacaagacttgcgaatggcaataccaaatacaactgatccagcattaattgcaaaagttgttagttactttgaagatgctgacgtcattaagccacaagatttacgagcatggtatcgtggccttcttgccaataaagcaggtcaacaagctgcctggaattggcttcgtgatgaatggcaatggttaaatgacacagttggtggcgatatggaatttgctacctttatcactgtcactgccggcgttttccatactcctgaacgattgaacgaatttaaagacttctttgaacctaaacttaatacaccaggtttaacccgggaaattaaaatggacattagtgtaattgaaagcaaagtcaatttaattaacaaagagcaaacagctgttaatgatgcaattgcgcaacaataattaactgtaaagccctataaaaaacgcaactaaggatttttcctcagttgcgtttttattttaaatctgctgctttaataaatctaaccttgtactttggcgttgtaaaatatcgtcgattacatctgctaatgaaatttgcttcatctcattaaaagctgctgcttgaatctgatcataatacttttctaatgacgcctgaatatttccaccaacaatacacttcaaattagtttttggatcaacatgaagtaaatcatgatccatatttattgcctggtagatatcaaacaggttaatctctcgtggctttttagctaatcgcggttcagcagccccctttctagttacgatcaaaccagcagtcctcaaatctgacattaattgacgaacaacactcggattcgactcaatactatcagcaatcgctttactagataagtcaccatcctgataaacgtgcaaatagcttaataagtgaacagcatcacttagtttatatgaatatttcatactcctattttatcttgttgttttataacattcaagcgctatagtattaatttatagttttcacttttaataactacgcttgttaaataattttaattctagcaaaataaagacatgataaaaataaaatcacatgtttgagcttgattaataaatatatttagcatatattactactgttggggtaggaatctcagagttattgtctaacggaacggaatgtgaacgttagaaggaggcttataactaactgctttgttattccgcattcaccatgaacggaaacgtcaatgtgttccctaacaaaattttcaaaagggagtggattgatatgtctacgttatcatttgccggaccgcgttttactacaaagaatttgactttagctgctatgctggtcgcactgcaggtaatcttaaataaactttcaattggagatccagcggttttaaaatttagttttggttttattgccactgcacttattggttactgtcttggaccatggattagtggatgatcaatggtcgtatctgatatcataagtaatactattttaaattcaggaagcttattctttcctggctttaccttatgagcttaagttccagtagtaccggccatactttcatggctctcctcttcattcgtttgccaaaagagttgattatctggccgattgaaaccttgcttgtactagttatcctgcggcaattatcacgattaaatttaattgcaaagaagagcgaaaaataaatttatttggtggattatagaatgaagttagccacccagttggtggtaaataaaaaacgccattcggcgtgacatcaggtatcatattaagtgaaccaaacctatatgaaaggatgtccgtcaaatgacgcacttaaatgataccatgtctactagtttattgactactcataaaaagaatgctcatcttactaaagaagaacgtgtgatgattgcgactttaaagtcgcaaggactttccaatcgcgcaattggtcgccaattaggagttaatcatcaaacaattaataacgagctcaaccgtggtacggtccgccaacttcgtcgtcaaaaatctaatggtaagatttacgaatattcttactacatctatagttatgaagctggtcaggccacatatcttgaacatcaccgccattctggtcgtcgtcgcttatattattcttcaaagcaatttttacgattagctgatcagctaatgcttggtgagtttgacgaccaccattactccccacaagcggttatttataaggctcgagatttaatgaatgatggcaccctgatcccaaagtcggttgtaactttatatcaatggattaatgagggtgtgcttcgtacgtccaatttagacctctttgaaaagcctaaacgtaagcatcatcgaactcatccgcaagctaaaaggtgcttaggtcctaatattgctcaacgacctcaaactgcggaccaacggtccgaaattggccattgggaactagatacagttcagggacagaaaaacggtaatgacagtgttgtactagtaatgactgatcgcctttcacgagttaatatcacgagtaaaattgctggtaaaactgcgcatgcagtaaatcagttctttataaatttacgccagaaaatgggcacagatgcttactatcgcatctttaagacaataacctctgacaacggttcagaatttagtgagttaacacaagttcacgatcatgttttctatgctgatccgtattccccttgggaacgtggatccaatgagatcaataaccggtttctccgcaaggagattaccaaaggtgaagctataaataactatagtagtgctcagatcatagcgactaatgattggatgaatcactatccacgagctatgtttaatggacattcgtcaatggatatctatcgtaaggccttctaccaagagatatcacagctccatcaaccaataatcaattggtcagtattatttatttgagtccagtggctaacttattcttgaaatttaggaaataaatttatttaaaaaagtattgcattttaaatgaattaggttaaaatacaattaacaaaataaaaaagcgatgagaaagaagagtaactagttgtattcgttcagtgaattggtggtagtgagaaaccagtcgaccctacactagtgaataacactttcgcgagtgctgccaacccaaataagtttacttaaagtaggcttggccggatccggaccgttacctcaccggcagagcatgatgtgctcttgaggaggcctagttttatactagacaatttgggtggcaccgcggaaaaaagcctttcgtcccttgattataaggggaacgaagggcttttttaattcattcctaaatctattattttaaggagtgtctattatggacttaactattccaaaggattacgatccacgtctttcaattagagaaactgaaactgctattcgttatattcgtgaaactttccaagacgaatttggtaaagagttaaaccttcaacggatgtccgcaccaatgtttgttgaaaagagtactggattaaacgataacttaaacggtgttgaacaaccagtatcgtttgaaatgaaggatatgccaagcgaaactgttgaagttgtccattctctcgctaagtggaaacgtcttgctcttaagcggtacggttttggtatgcatgaaggtctctacaccaacatgaacgccattcgtaaggaagaagacctcgataacttccactcaatttatgttgaccagtgggactgggaaaagattattagcaaggatgaacgaacagaagaaaccttaaaggatacagttcgtgatattttcaaagtgattaagcatatggaacacgaagtttggtacaagttccctcaagctgtttaccatttaccagatgagattcactttgttacaacgcaagagcttgaagatcggtggccagacctcaccccacttgaacgggaagacaaaattgctaaagaacttggtgctgtttttgtaatgaagatcggtgacaagttgcaacgcagtggtaagcctcacgatggtcgagcacctgactacgatgactggagcttaaacggtgatattattttctggtatgaacctcttcaacgccggatcgaaatttcaagtatgggaattcgggttagtccagaatcaatgaaataccaacttgaacaagccgatgcaactgatcgtgaaaaattaccattccataaaatgttgctcaatggcgaattaccatatacaattggtggaggaattggtcaatctcgcctttgtatgctccttcttggcaaagctcatattggagaagtacaggcaagtatttggccagaagatatgattaagaagtgtgaagagaaccacattcaaattctataatttaagggagagtataaaagtggaaactattacaattagtgaagcaccaaagcatgttggggaaacagttaaaattggtgtttggttaactgataagcgttcaagcggtaagattgcattcttgcaactccgtgacggaactggatttttccaaggaatcatccgtaaaaatgatgtttctgaagaaaaatttgattctgccaagcatgatttacaccaagaaaccagtttttgggtaaccggtgaaatcgctgaagacaagcgttcaaagtttggttatgaaattcacatcaaagactttgacattgttggcgaaagtgaagattacccgatcggtaacaaggaacacggaattgatttcttgcttgataaccgtcatttatggttacgttctcgcaagccgtgggcattaatgcggattcgaagtcgtgttaagcttgcgacaatggaattcttcgaaaagcatggatttactcaatttgatgctccagaactaactggaagtgctcctgaagggacaacagaattatttgaaactgactactttgatcgttctgctttcctttcacaatctggtcaattatatgcagaagctggcgccatggcattaggccgcgtctacacgatgggtcctactttccgtgctgaaaagtcaaagactcgtcgtcacttaatggaattctggatgatcgaaccagaaatggcttggatgcaccaagatgaaagtcttaagattcaagaacaatacattgcttacttggttcaagacttaattgaccactgtgcacgcgaacttgaaatggtagggcgtagtgtagaaagtttaaagccgttcactgaattaccatatccacggatcacttataaggaagccattgaaatgcttcaaaagggtggctttgatgtagaatacggtgcggactttggttcaccagaagaaacctacttagccgaccaattccaaaagccagtctttatcttgaactaccctaaagaaatcaaggctttctacatgcctgaagatcctgaagattctcgccaagttatctgtgcggacttgcttgctccagaaggctacggtgaaatcattggtggttctgaacgttcctacgactacgaatacatcacaaacaagcttgaagaaaacggcttaagtaaagaagattacggttggtacgacgatttacggaagtacggttcaattccacactctggatttggaatgggacttgaacgattccttgcctggattactctccaagaccacattcgtgaaaacattccattcccacggatgcttaaccgtttgaacccttaataacgaaaaagatgagactagatttttagcctcatctttttttatatgcttttttttgaactcaatttactttttctttactattaaaatgagctgttccttttccccagtaaaatccttgttgtaaaataactggattcccagcaaattttttagctaattgccgatttgaaattccttcaataacaaaggtaagatgatgtttttctgcaaaagctaaccacgcattaacaaagcttatcatcagttcataatcttcatccttaaaaagtaatagcgataatttgattcgactaacaacctttagctgtcttttaatgaatgcatagctattactacccgcacacacatcatcaatcgccaattcaaagcccatttccttgagacgttggatttctctatctaaataatcaagactatgaatcgtttcgcggcgttccgtaatctcaatggccacgtgatcgtgatatgcttcgcgaatctctgctaaaaattgccaaatactttcaaatttcatttgacatggttctaaattaatatatattttgcgattttgttgttcgtttaaagcattttttaatgatttacggcttgccttaatccatgcatcgttaccctcttgtgttgtgagactgtgcaagaaattaattcctggaaattcgccattattatttcgaataagcatttcataagtgtcaatttcagcattcatcgcttgatcaacactaaggattggctgaaatatattgtacatttttatccctaacttttaataattgctatttattttacgttctgaactagtctttcgaggacgttggtgatgctgatcagtaacaatccatccccggccattgttctttacaccatataacattttatcagctcgcttcagggtcgtgtcaagtaattcatcattcaaatgatcagttaaactgcatgaaaagctaattgttaatttcattccctccttggtaacaatcaatttattattaaagaatttttcaattgactgtagtaattgataaacctcttctagtgaatggttagaaactacaatagtgaattcttcacccccgaagcgatatacataaccatgcttggaaaatgcggaatgaatttgttcgcgaaaaactgttgaaaaataatttaacacttcattaccagcaaagtgaccgtatgtatcatttatcttcttaaagtgatcaatatctaatgccccgattacgatattatggatttcactattattatctaatcgattaatttcttgactaagcgctcggtagttaagtaaccctgtcaaatagtcacgttcactttctttttcaagaagttttattttttgctcatttttcttctcactataaaaacgttgctcttcaaacatcgcaataacgaataatcctaacgtggctgcggcaacacttacaggtgaaaagctatggttaatccccagcgatactaactcaactattcctagcgatgcaatggcataaaaataactaattcttttagaaatgctgcgccaccgcgttaaaaccaaacaaattgtcgtaaaaacaatcgattcaatgatccaataccaccagtcctttagcggtaaaatccccattaagtattccacgacattcacaaataacggggttagagctaataatacccaccatattttatatactttatcgcgaaaaagcattgtgacagaaacaacttgcatgaaaacaacttgcccgatattaaataaggacaactgaaacaaacaaaattcctgaataaagtaagtaattataataacggctcctagcccccaactagttaaccgtgaattcttatacgaaacccaataccgttcaaaataaatttgactgataatcatacaaataacgatgattggtaaatagagtatcgcgtaaaaaagtttaagcgccaacttattttcaccttttcaaattttatttttattaatagctttaaaattatacttcttatagtcgaattaatctagtagcgcttccaatcttcatttaataaacgtttcctgaaagaaccgtatgatataattatttctgctaacgcgttaaaaatattaagaaaggatgacagatcttatctttataatgaaaaataattaccatgatatgtattttgagcaccaccactggctcttaaaaattcgacaaacactaattatgttccttagctggtgcattttacttatccccattattatcactacttcaacctatgtggcttaccggacaaatggtcatcgcgggtattttttctgggattatgctgaaggatttcgtgaacttaattttttagtaatcattttgctatttgctttaggaatgattggggtattctgcattacaatgggatatatccaagctcaaaggactcgtggactaactacaaaatggcccatgttcgacattaacaaaagtcatttacaacgccaacgagctgaatcattcatgactaagcagtttggtgattttgagatgcgaataaatacgcgcaattttgctgttaagcctgaacaaaatctagccaagaataaactgcgcgatattattaacaagcccataggagatgataaagatggtttctaacattttctatgaagcatttcaaactaactccccatggatgatctctcttataataatcaatttaattttatgtatatatcctattttaggagcgatgttctggttctttggcgcaatatcatatgttctatttcgccaaaaagaagaattaccaccaaaagctgaaattaccaccgaaccttttgtcacgattatgattccagctcataacgaagaaatagtaataaaaagcactttagagtatttattaacccaattgaattaccataattatgaagtgctggtaatggatgacggaagcgatgatcgcacccctgagattcttcgctcaatgcaagcaaaatattctcgtctcagagttattagaatcgaacaaaatcaaggaaaggcccatgcatttaatattgggcttttctttgctaagggtgaatatattttgagcaatgatgctgatactatccctgaaactgatgcactgataaagtatatgcaatattttacaagtactaacgggattaactatgctgctattactgctaatatggacgtttataatcgttcctcattatggggtaaatctcaaacggttgaattttccagtattgttggcataatcaaacgaagtcaaactgccattaataacacgatgtatgcatacagcggtgcaaataccatgtatcgacgcgattttcttattaatgttggtggtttccgccaagatcgggcgactgaggatattagcattgcctgggaccatacctttattaatgctactccgaagtttgctccagatatcgttttccatatgaatgttcctgaaacgtttcacgatttatatcggcaacgtaagcgatgggcccaaggtgggacagaagtttggctttctaattttctgaaggtttttcgccatccgtggcaatatcgatttgtcatccccatgctaacagacacaaccttatcgattatttggtctttctttttttggataacaagtatcattttcattattacaatgttgtattttgcaataattggtaactacgaacggatttggcacggcattgttatgagtatgatctttgtcaactttcaattaatagccggtctttttcaagtactggcggcattgattcttgattttaatggatctaagttacgctatttaatgttttcgccactttatctcttatttacctggatcgttaatcctttaacaatcgttactacatttcataaagcgataaaaactgttaccggccatggaagtggtaaatgggttagtcctgaaagaaaggtagttgataatgatggcaaattttgaaaattttctttggtggatattcattatctttaccctaacttgtggcggcttttgtattgagactcactatcgatataaaaataaagacgggattgataatgagcacaaattttcaaataaatataagtattttggccaacctgtttatgacaaacaaaataaaattcatggttatgaacttttattacgggaatacaatcatcatactaataaatggcaattaccacgaaacgttgtggacttccccctcagtaaaattgtttctacaatccaagaaatcaatccacagttaaaagatatcgcaaacttatcgttaaatatgaccgtcagccaaattaccgattttcgcgctgagtatttctttacttgggtcttaggaacgacaaatattaagcaactagtcattgaattagatgctaatgatattagacgtgccaatatttttaaacgtaaagaaatattatatatactaagaaaaatcaaacgacttcaaattaaagttactattgaaaatgttgattcttctaaaaaaacatacaatttgttacagcagtatttgccagatattgcctatttaaaatttaaaatttaatattcattcttttaataagtcagcaaatcactggatagatgttacactcgcacagtggcaacgaagaagcgccatttttaacattgaaatgattgtcggtaaaattgaagatgctaaccatattgcattagtaaatcaactaaatatccctttccgtcaaggttatgcttacggtcatccagaaaatttaaaaaaatcgagtaggagataattgattagttcaattatcgacctctcacaccaccgtacgtacggttccgtatacggcggttcgacaacttaatcacattgaattgactggagcgtcttggacatattcataagtccgagttgttccagttttctattagttagagaatagctcaaggtcttactgtgtgcagttcgccagtagcccttgcgggtactagcgaagacatatgcatcacgctgggacagccccagcttctgtaagttagttaccttagttttaagcttcttccattgcttccagatatactgtcttattcgggccctcaaccacttgtcaaggcgttgaataaagtcagttagtttcccaattgagtagtactgaagccatccacgcatttttcgatgaatttcttcaaacattcttgtcagggatattccacgattacgtttagttaataacctcaatgctttctttactcgttgttgcgattgttttgctggacgggcgtaggctccattgtggtctacacccaacgaaaagccaagaaactttaaccgtagcgggctaccgactttggttttatctgggttcactttaactttcaatcgcttttcaagaaactgggtaatgcttcgcattactcgttctccggctcgttgacttttaacataaatgttacaatcatccgcatagcgcacaaagtggtgaccacgtctagtcaactctttatccaactcatttagatagatattcgccagtattggtgacaatggccctccttgtggggttcctttttcactcttagcgaaaagcccatggtctaagactccgctagttagaaacttacgaatgagccttagtgtccatgggtcatcaatatattgttgaagatacttaatcatcaagtcatgattaacattatcaaaataggcttttaggtctaagtcgacaactcttcgataaccttgattataaagatctactacttttgcaatagcgtcgtgagccccacggtgagggcggaagccaaaactattatcagagaaaacacgctcaaagataggtgtaagaatttgggccacagcttgttgaaccattcggtccaccactgttggtattccgagttttcttactccaccattaggcttcggaatttctacccgtttgactggtgctggtttatacttgccctcacgcaaactagcgatcaattccgtcttattttctctgagatatggcagaaggtcattgactgtcatatcgtcaatgcctgctgcccctttatttctcttaactcgcaaataagcctgattaaggttattgcggtccaagactaagtcttggatagtgacactcatacctttaccttcaccataatcggtactacgcgcccttgtgtactttcggttttccaaacctatcctcgacaagcggtcagcttgttgttctgttttctgcgattgtcgcacctgattacacctccgatataagttacaagttattgtcgttcagtccttcatctgattactcagactactatgacctcggctgacttctggcttactcaacgctacatcactgcaccgcttgtttctgtggaaattaaacttattcctcttgtcggaaacgtgtaggccagatctccccgggtaaggatattaactttcgtaccatgtcaccggtagctttactgaaagtaacttcgagtagtgttggactttaacttgtcatgcagtcttatccagttagttccagccttatagctacttcttgttcatcggtgcagtactttgccttagacttccttcagattccacctcgcagtggacacccttgtcctcagctcatggttccgactactacggcccatagcggactctcaccgcctagctaatacccatgccgggcgcacataaataagcgaagttggtttttaaccagcctcgcttatttattttagaaatatattcatattaacaataattttgcactttagctatttgcgataaaatccaataaccgatacataactcgcttattttcagccggaacgccatgctgaataatttcttttccattttggtgaagatcattatggtctaatggatactgatcatcatttacagcaatctcgcgaacattatctgctgtcggctcaaagtggaactgaagtccaataacattaccgttcataacaaagccttgatttttaactaagtcactactaaataataagtctgcttgagctggaacttcaaacatctcttcgtgccaatgcagagcagttaatttttggggaatatcggaaataagatcgctttttagatacaccggcgcccaaccaacttctttatgtggtgccttctttacggcataaccgagtgtcttagcgatctgttgagccccataacacgcgccaaaaattggcttatgagcatccaatagtcgctgaattaaaactcgctcttgcttgatccacgttaagtcgtcattagggctcatgggaccgccaagaataatcaacatatcagtctcatcagcagtcggcaaattaccaaactgatagggatgataaacgtacatctcatgtccgcgatcctgtgaccattcttgaattgttcctggtccttcatttggcgtgtgttgcaaaacattgattctcatcgaatatcctttccgtcgacggcaatgttgtgctaggtatcgcctgcaagtacctaagatattattgttataacatcaaatcatgagcttaacaatagtttttattcccaatattcttcatactttcgtgatgccccggttgcagcatcaacatctgctccaccattatcttcacggcgaaaaataaaaactggctcttctgcctcttgctgataatcaacggtaacaactagtcctgagaagaaccaagcatccgcaaagttaacatggtaattaataccatctttttttatgacgattgttgcctcatcgagcgtcggttctggtttatacccttgcttaggaccatgtttaacattgtgtggttgaattgttttaccataaaattttactccatttccactagcgaggttaaatttttgttggaaccacttgctagcagcatcagtaataattaattgcacttcaatcactccttagtttactatttcttttattttacaaccaagaacctatatttacctatttctgaaattaaactattcgcagtctccctctaactttgtcgtattattatttacacgtatagattaacatctttattaaatagtttcaaaggaatttatttaaactaaaatacatgttgactttataaaaacacgtgttattatagcacctgtaaattaaaaaataacaagtttaaaattaaaggagattgttaattatgaaatatgctgtaactgccgctactggtaacttaggacaagctgctgttaaagaattaaacaagttagctggtgcagaaaatgttattgttattgcccggaacactgataaggctgctaagctctttcctaataatgaagttcgtcaaggagattacgaagataagtcatcaatgatcaatacttttaatggaatcgatcacgttctctttatttcatctcaaccaggtggtaaggttgatcgtgctactgctcatgctaatgtagttgatgcattaaaggaaaacaatattaaatttgttgcctatactagttttaccgacgcacaaaattctactgctgcccttgcaactgaccaccgccttacagaaaatgcaattaaagaagcaggcattgatcactcattccttcgtaacaactggtatcttgaaaacgaaattggtttccttcaaagtggagctgctagttgcgatgcattgtactgggctaacaacaaagctggttgggcacttgaacgtgattacgcagaaggggctgcaaaagttattaccagtgaagatcctcgtgaagtttacgaatttgctggtaaaacccgtacttatgatgaattaggaaaagctctccaagaagctactggcaatgattttactatcaagcagatttcccatgatgattatgtaaaatcattagaaaaagctggcttagatactccaacagctgaacttttcgcatcattccaagacccaatcaactctggaaatcttaataaagaaagtaacgatttagaagaagttcttggacaccccgttactccacttgttgatgctatcaaagaagtccttgcacggtaaaatcatttgttcgtgaaaaccatcgaggctgagagaaaacaaagttttctctcagcctcgatttcttattaattatttttcatcatcttgaaccatctttaagctggagccaaagatctgttcaatcgtaaccgggtcacggtggtcaaagaattgactttcgttcttgttaagactagccattcttttcatatcatcatcggaaagttcaaaatcaaagacatcgatgttttcttccatccggttcttgtggactgactttggaatgacagtaatgccccgttgtaaaagccagcgaagaattacttgaccattgctcttgccatatttagcagcagtctccgcaattgcttcgttagtaaagatatcatgcctaccttccgcaaatggtgcccatgcttcaacacgaatatcttcactttgcgcaaacttaacttcttggtcttgttggtaccaagggttaacttcaatttggttgaccgctggcttaacaggcattgttaattcaagatcctttagttgatcagcgtagaagttcgatacaccgattgcacgaatcttaccttccttttgtgcttcttgtaatgctcgccaagcacccattgtatcgccatatggttgatgaagaaggtaaagatccatgtaatcaaggccaagcttttgcagtgaagcgtcaatccctgatttagcccgcttatagttaaaatcagacacccataacttagaagttacaaagacatcttcacggtttacactactattcttaattgccttgccaactgcttcttcattttggtaagcagcagcagtatcaattaaacgatagccgacttcaagagcatcggtaactgcttgttcagcttgacttaagtctggaacttggaatactccaaatccaagggttggcatttctactccgttatttaattttactgttggtacatttgtcataaaataattcttcctttctgtaattaatcgttgtctatatattaattgctaatttacaaattgaaaattactccctttacatggtagtatacaattggcgcatactattaaggagtggtctaatgattgataattacttgcttgaagaattagtgaccttcgccagtgaaaaaacacttgctaaaaccgctgaaaaacttagcgttacccagccgacagttacccgggggatgcaaaaattagaagacgagcttgggattcaattatttgaccgccagcccaaccggatcgtcctcactgataccggaaaattagctgctgaaaaagctactgaagttctcgccgtcaaccgtaattttgttcaacaacttcaaaattatgctgctcgacaatcagtaattaaaatcgcatcaattgctccgggtccattaattctgcttcgcgtaaaaagtgcatctttttctacacaaattgcgattgacaagaagtttattactcatgaccaaatcaccacttcacttttaaataatgaaaattcaataattatcagcgaccaagagattcagactgatcaaattgaatcgcgttatttagggaccgaaaatctctatgttaatcttgataaatttatgtaccttgctaattcccaacaggtttcttttaaggacttagccggattaagttttgtcgttttgaacgatatcggaccgtggaaagaaattatcaaaaaatatattccaaatgctaaatttttatatcaagaagaatgggccgcgcttactgaaatcacaaaatattctagttttccatactttagtactaatataacaacagttaatccacaacaacgtacgtcaaacgacgatcgagtccgactcccgattaccgatgaagttgcgacaatgacgttttatgctaattaccttaagaaacaaagaaaatccttaatgcccttacttaatgaaattagccaaaactggcctaatttaagttaaattataggcgtttaacttgtttcgctgaaaatccctatttaaaatattaataaaaaatgaatcatggtgactaaaatgacgaaaaaattattactcctttcaaccggtggaactattgcctcggttgtctctgatgaaggactagctccaggcgaatctggtgaagaattaatcaaaatgcttggtcggctggaatatgacattactgttcgtgatattctcgaattagattcatccaatattcaaccagaagaatggaaaattattgccgaaacgatctatgaccatcgtaatgaatatgatgggatagtcgtttcacatgggacagatacgatggcttatactgcttcaatgctgactttcatgcttcaacatataaatattccggttgtgctaactggaagccaagttcctatgaatgtgattcttagtgatgcccctgataacttacgacttgcctttgcagccgctgctaactgcgagccaggagtctatattgcttttaatcgtaaagtaatgcgtggttgtcggagtgttaaagtacggacaaccgccttcgatgccttcgaaagtgtgaatgtcccaccagtaggagaagttacttcagacggcttttccattagggatcaccagcatccccaacctggtaaaagtcaattaaatactaaaatcgatactcatgtttcactggtaaagctcttcccaggatttgatcctgccttgctccatgcaatggctaaaaatggctgtcacggaattgtgattgaagcgtatggtctcggaggaatgacctcgattcggcgaaatatggtcgctgcggttggtgaattaatccgcaatggcattccaattattacttccagtcagtgtctttacgaacgaagcgacttgacaaaatacgaggtcggacgacttgcactactagaaggagcaatcagcgcccgcgatatgacttccgaaagtgccatcactaaattaatgtggggtcttggtcaagggatggatgttaaagaaattgcagacttcttcaatactgatgttgctggtgaagtaactttagattaaacgaataagagacaggatgaaaattttgtttttcacctgcctcttattttttacttaaaaccagctacggatccagttaacaaaccgggtccaccaagactgagcttgttgcttaactgcctgcccgtcttgagaattcaagaattttttcgccttattcatcatatctcctgatgaattctttacattattaatcgtatcagttacgtgcgagctatagtctttacttgaactaattggagcattattaaactgaacaagcgcattgataattggttgttcatgattctttgtttcattgtaaatgtttcgctcttcaagtttctgattaaagattacttgaatttgattttgcgttggggtagttccttgtttcttttgttggttaatttccttagtggtatcaccaaccgcagccatcaacttaccaggatatttactatcatccttattggcttcaattgccccatttgttgcggtcaacatttggttagcagattgagtattttgctcatttaaactaactccatctgccgcaattgctttatagactccggttagagctgactccccagaaacggcccggttagcgctaacggtgatagtaacatccgtaacccccgccatttgcgcaaccatggcgtattgttgagcggttactttagtaatattatcctcaccattaaacttttttacattaactttaatccccgaacctggatcggtggggacaattgctaccgaactaaccatggcggcgttagttgtcgaaccattcggattgatatacttctgataatcactggcagtagcggttaacgttgtaaaattatcatcgactgctagcacattatttaattcattcttctcggcagcccctgctccatatacaacatatgatttatttaacgtatgagtctgggtagttgaactgctactcgtactttcactagttgtttcagccgccaaaactgtggcctggctaactggcactgctaataaagatagtgcaagagtcgaagtaataatgattttggttaacttatttgagcgcacttttttactccttttaaggcaaattaaatttatgttaatgataagaaaaaatccgccaaaatactagcggattttattttctttaccacagtttaattattacgccagtggattgggcgggagcagaaaggcgctcagtcataacttggcttggccgttaattctctccctcgtcttgcagagcttcaccgagttgcttcattcctgccttgatctggtcttcctgagcattggagtagttcaaccggaaggcaccgggctgtgggtcacctgcataaaatgggtcacctggtacaaaggccacgttatgttccagacattgcttaaaaagctcaacagtatcttctactccgggtacttcaacccataggaacattccgccttctggatcagtatatttaacaccttgggggaagtatttctctagcccctctgtcattagtgctttgcgttgcccatacaggtcactaatttgcttgacatgtgcatcaaggtcgttatgcttcagaaattctactacggcatactgggctaagttatctgtatgcaagtctgcagactgttttagtaccgtcagcttattaacaacagcttcatcggctaccacccatcctaaacggaaaccaggagcaagcgtcttggagaaagtccccatatagaaaacgtgtccggttttgtcaaacgacttaactgctggcacatgctgccccttaaaacgaatttcaccataaggattatcctctaacacataaacatcatatttagcggctagttcggccagcttttcccgtcgctttagtgccatggttcggccagttggattttgaaagtttggcacggtgtaaaccaacttagcttccggatgagcctttaatgcttcttctagggcatccatcttcatccccgcttcatccatttctacccccacaaagttggcaccatatgatttaaagacatcaagagcacaaagataagttggctgttcgaccagtacggtatcaccaggattaacaaaggccttcccgactaagtcaagagcttgttctgaacctgtcgtcatcaacacattgtctagctgtccggtcacgttttctttttctttgacacgttggagaaccaattcacggagggccgtcacccctttagcggctccatactgcattacttcttgaccacgttcagcaaacacctggtcaacagcttctttcatcgctttgacagggaaaagctcaggtgccggcaatcctccagcaaaagaaataatctttggatccgccgctgcttttaagattacaccgactgcatctgttccatctgctggcacgcgtttggaaaaattaaacttggtcattgtcgtcactcctcgtaatagatgccacatggcattaacgttatcaatctattctgcctgagctagctggtttgctcgctcttcttcttttttcaatcgttctttgatgtatgttgcggatgttgctagttttgattcttcttccggcgtcaagtccagatgcagctgctccactaccccgtcacggccaacgacagctggatatgaaaggtacgtgccgtattcttcacgataattagaaactggcatttcagttcgcgcatcattcaataatgcgttggttaaccggactgctgccgtggcaacaccataattagtgtatttcttcccttgatatacgaggtagcctccttgacgagcacgttcttctagctcagaaagctttaatccccgttcttttgctagttcagtgaccggtttccccaggacgcggactgtcgaccatgccgtaaattgcgaattgccatgttccccaagattaaaaccaacaacagagcgtgaatcaactttcaaagcttcaccaacccgggcccgcatccgtgcagagtcgagtaaggttcccgtccccatcacgtgttcttttggtaatcccgttaatttttggtacattgaggtaatcacatcacaagggttagtaacatcaactaacttaccgtgaaatccattgtctactaacatctttgctaccaagggcacttgggtccgcgtaaacttaaattcagcaaagcgatcatgatctggcgtatcaaccaactttgatttccctagggctgacacgaccacatcacaatcacgcaattggctttcatcattaacagtcaggttagtatggtaaggcaaattggccattgcatctcgtaagtccaaagcatccgcttgcaccttagcttcattagtatcaaataatgcgaggtcatcgacaaagccaccagcaactaaatagtgcgctaccgttgccccaacgtgacccattccgactactgctacttttctcgtcataataaaactccctttctcttttattgcacaactatgtaaaataattaattctagtcagtcacgtccacactcacagtgccgaagccattatcaaatttggcttcccacttgccggtagttaaatgtggtggtaagaggaaagtacctgatgatactagctgccctgcgcggaatgtcttcccttgttcttcaagctttctgactagccattgcaatgactttaatgggttgccaagcacttcacttgacgccccactatccacttctttgccatcgtggtaaagggtgacatttacatttgctgcatcatcaacggtcttaaacacctcatcggttggtcgttcttgaccatatactacatacccaccaacagcacaatcactcatgacactgaatttatttagatctgggaaccagtcagcaaaacgactatcaggtacttccagcgtgccgcagacagtagtcttatgtaataaatcttccatcgaatcactggcgtgcaagtcagttttagcacggaagccgagttcaacttccactaacggagccatcgtttgttctttgagagagagaacggcaggtgatggtaagaagtgggcatcaacttgttgtccatagagcggactatcagaatcaaacatgtcctgggttttcttactagttaaggaaactttgtacccgccagttgggagtccctttaattcaacgaaacgatcttgaagggcataagctgtattatcatcgctaacgacctctgcccattcatccattaccagtggtttcttgctttgataagcttggaaaagttcttgagcaaaagcttcttgttcttcatttaaggtaacgtttttatttgcagtcataataatatcctccttaggacctgaccgctgttaccaattaattatcggtctaagccggtcaggtcatgttctaatttttcttcaatgttaataatgtctgaaatatcactgtctgccatgaccaccaccacctttaagtatgtctaataaaaaacgccctcctagctctattaagaactaaaaggacgtctatcaacgtggtaccacctttatttacaacacaagggttgcctcaatcaactgcccacaatggcaattaatcggcaagataatggctgctaccagtatgttctactattatttcgacatacaactcgcgagggatttgtcgcaactacctcctaccggtttccaccaaccaccggctctcttaattcagcagaattgacgattctcggtcaacgttttttaatttctcttaattgattattagtagaatatcacgtgaaaatgagaaaagcaagagttaaattaaaaaatcattaaaaacaatattgccatggatcgttattcacaaaatatgcacagtatcaactaatttgactcttcccacaagaatttaatcaattcacggtttacttgactgttattgtggagcttactgtgctgggcattctttccatgaatttcaacttcgcgatatgatttgcacgatcactgactaaatactttaatgatttagcagaatttaccggtacatcttcgtccgagtgactaccatccccaacatccccataaatatttaacacggctgtatttttcggaaaggtctgccgtaaaccaagtaattcgcggtaggcagagtccattttctctagttcgccggtctttggatttatcttagcattttgcgtctcactttgccctaccagtccattatagtgtccagcaatcgctactaagtgggctacttgcggaaagcttttatcatttacattgtcattaatataattgataatttccaagtttcccattgaatggcccacaaggttaatttgcttataatggtgttgtttttctaaagctaataccacattttttacatattcaccaccatgatgatagccctgcgtgtaattatctcgatatgcacttaatttattatcttcaaggttgacttccacaataggattaacggcatttgcgggaattgggcggtttcccttttttgtcaacattcgcccgcacaattgtcttggttacaccggcatcacgggccgcattagccattttttcttcggcatgagaactgctcccccagccatgcacaaaatcgtcggtgttgatgattgaatataatgggttacagcatgtgctcgtgaacttattcctaataggccaactaaaataacagcaaagcctaataataattgagaatactttttcatctaatcttcctttacaaaagcttcatcaaagaattgtttaatcttattaaatggtattttatcaactcgatcataaaggtcaatatgttcacaatcatctacaacatacatctctttaggttcttttgctagcttataagctcgttcagagaaagcacgtgaatgagcatgatcaccaaaaataaaaagaattggccgtggggaaatctcatcaatataagctaatgctggaaattgcatcatggcaaggttagaagtagtagtgaaatttccacgagcatgagcatgaaaaccacgaggaacagcataaaatcgattccattcattagtaatcggatcgatttctggcaatgcatcaacattcgggtaaggtttagttgggaaacttggcttatattcaggaatcccgcttgcataatcttcccagcgctggttagctaactcttctttcattttatttaactcttcatcgcttaggttcatcatcccacgaacatcagtaatatcatacattgatgcggtagcaacggctttaatccgcggatctaccgcagcagctgctagtgcaaagccaccagaaccacaaattccaataaccccaattttgttacgatcaacaaacggaacttcaacgccaagaaaatcaaccgctgcactaaatgattctgcaaataaacctggggaggaaacgcgacgtggctcgccagcagaatctcccatattggcttgatcaaaagttaatacaacaaagccacgctgagcaagttcattaccatacacggctggtccttgttctttcaccccaccatatggcgcaccaataattagagcggggtgcttttctttaatatctaaacctttagcgtaataaaggttaccggctaattctaagccataacgatttttaaaattaatactttgccgttctacgttttctgataatggtgtaatgtatccaaatgacatattattctcctccgatttttttaattactttagcaggaacgcctgcaacaacagtattggcaggaacatctttactaacaactgctcccgctgcaacaacagcattttcaccaactgtaacgcctggtaagattgtagcatttgcgccaagccaggcattttccttaatgaggactgatttcaattcaacgccgcgtcgcttttctggatcaaggggatgatttaccgaaatgattgttacattgggtccgactaaaaccttatcttctaattcaattccgccgagatcagtaaacatcgcaccactgttaataaatacttgtttcccaattttcaggttagctccgtaatcactacggatcggcaaacgaatttcaaccgaggcatctattttttgaccagttacatcattaaggacatggcgaatttctctttgcgatgctgaccgactattcaattgttgaagtaagtcttgattttttaaagccgttgccgtgattgtcgcaagttcttctttttgaatctctttcattttcatccctcttttgcttgaaattattgtttatatcttatcgagtttttataataatgttaaatacttatatttaatgacatactatagttaaaaagcatattggagtgattaaaatggaagtccgtgtactgaggtattttattgaagtagtccaagaaaagaacatttcaaatgccgctaaaagattacatatttctcaaccgacactatcacgacaattaatggatcttgaaaaagaacttgggattactttatttgaacgaggacaccggcaaatcaaacttacccaagaaggctattatttatatgaacgagcgcaagagattactggcctcgttgacaaaactgaaaccgacctgcaatcacaaaatgtcataagcggaacattagatattggtgcaggagaaagtgcagctattcagccagtaatgactgtaattggtgatattatcaaaaagtatccagatgttaagattaacttagtaagtggtgatagcgatcaaatctatcagcgcttaaataacggtaccttggattttggaatcataatgggaccagaaaagctcctagattatcattcaattagattgccgcaaaagaatatctggggaatcttagtccgaaaagatcagccgattgcagaaaaggaaaagattactccggaagatctaaagggtgtccctattattacgtcagctcaatctaaagagcaggatgtgtttcgggtgtgggctggttcattaattgatcagtacaactttattggccagtacaatttaatttttaatgctcgtttattagtcgaaacaggagcgtgccttgcattaacctatgaaaatctgatcaatatcactggaactaatcttatcttccgtcctttaacacctactattacagatcaaaataatctcatttggaataaaaaccgtcaattatctaacgttgcgcaggttttcttgaaccacttaaaggaagtacaagtagtatagaataaagccttttctctcaaacactggcttttatattacttccctatagaactaatatgatctattaccattgtttaaaaagcaaacgaccttatcctaaaacgaataaggccgcccaaacttatatgactaaaactctaaagtacctttcaactactgctgtctataggtcttgaagttcttccatatggtctgctgttttttgatctaattcattatgctcatcagtaaaatcattgtaactaccactaatattagttgcatgattagcaaaatgttttaagtctaagtacgatttatggatagtttccttgtcggatttctttacagaatcatttttctgaattttttgatctaggtcatgcaggtcattaactttactatcaatttcatcaatctcgtcggtatgattactttggatagtatcaacggcagattctacatcaaaatcatcagaattatctattgcatcgctccattcttttccttcttgctttgaaagatcttcaaccttagaaccaagtgtgccgtattgatcaataaaatcttctttatcatccttataatttgatttgttcttttcctgttgttctgtagcttgttgttcttgagcttcatcaatacttccctgcgccattccagcaattagtagtgaaataatcattactataagactaatccaaaaatattttttatttttcttaagagattcattttctttatcttttcttcctttaaaccacctaataccatagacaattgcgactataaacgtaataaaaaacaccaaatcaaataacgttaccaatatctccatataaatatcctcctcaaatatacaaaaatggtcaaccagcgtagctaattgcgtcgattgaccatttagttttaaaactcttacattttaccaaaaattccttaaactgcatatgtttaatacaggaaccaccactaatttgactaatcagataaaattttagattaatagtcaaattcttctttcatatcatcaaaaaagcgctgaacaactggatttcccagcttcagcgcttctctttatttaaaattaagtgagtcaatccagccgtcaatttggcgtgggtcatttaaaattgccccttggttgactttggtatcataaccattttcattaaccgttcgttcaacatagttttgtgagcgatcatagcttgttccaccagaagtagcaaatagtgctaaattcttcccgtttaaatcaagatgatcaatcaccgtactaatcatccgcggcgggatagcccaccaaatcgggtgcccaatgacaatattgtcatagccactaatatctggtaaatcatccttaatatcaacccggctattatgctcgtgctgttcaattgatgtccggcttcgatcatcatgccagtttaaatctgcatccgtatatggttgtgctggatgaatttcggcaatatctgcatttaatttttgagcaatctgttctgcaatcttcttagtagtattggttgcagaatagtataaaacaagggtctttgccattaatgaaggcctcctttatcttaaaacgcagtataaattttaacgtaaaaacgcaatgatggaaaatgcttataattaatccttatctatgctttaaaagtattaatcgttagcgtgaatatcatatgcatttaataacatctcaccaacaccaggcgcatcaggatcatgcattcccttgcctttatcgagggcccgaatttgatccatttcttcatccgttaattcgaagtcaaaaatatcaagattactcttaattcgtgcttcgtgaacagacttagggaagacaacaattccttcttgattttcaaagcggagaattacttgaccagcattcttaccgtatttttcagcaattgctgtgattactggttcatgcagtaagtcagcattaccttgtccaaggggtgcccaggcttcaagacgaacatcatccttcgcaagaatttcccgtaatttcttttgttggaaataagggttaaattcaacttggtttaccgcaggagttacatcaaagttagggacaaacttgttccaaagtttaggtgtcatgttggaaacaccgattgaacgaagcttaccagccttttgtgcttcttcgactgccttccatgcttcgtcaaccgccccatatggttggtgaagaaggtaaaggtcaatataatcaagccctaatttgttaagagaagtttcaatagccttctttgcgtcttcatacttgtaatcttgaagccacatcttacttgttacccagatttggtcacgaggaatcccgctatccttgattgctttcccaacttcttgttcattcatgtaggcagccgcggtatcaatatgacggtaaccagcagctaaggcatccttaactgcattgtatgttgtaccatcagcagggatttggaaagttccaaaaccgattactggaatttcattgccatcgttcaatttgaaagtaggtacattatatatagacattatttttcgtctcctttgcgttaatcattgtctaaatattagcaccatattttctaaactaacattacttgattatcatatcagtatgcccgaaacgtatactaattgagtgaaggatatgggaaattttaaagtaaggatttaaaaacaacctgagaaaaagcttttattttttcaacagcctcgttattttatacgaatattgttacgatatcatggcactggctgcgcgtcgccaaaagactcgaagctaagtcccctgtgccgtgctaaaccccattctatccttagcccctctttgttgaaaaattaattcacactcacctacttttcaaatttaattcttgctcatatcaataattactttacctttattatgtccctgctgaacttttttcatcgcttggggaacctcatctagtgaaaagattttgccaaccgtgggatgaatttgattttcaaccaagatcttgtttgcagctgctaattgttggccattagctgttacgaataaaaattgatagtctattttctttttagctgcttctttttcaatactacgggatgcaagactaaaaagtccttgtttgaacttgctcattttcattcgtttagcaaattccttattaggtattccacgtaaagatacgagtttcccatgaggacgtaaaattgccatctgcttaattgtttcttttccacctaatgtatctattactaaatcaatccctgaaagaacttttgtgtaatcttcttttgtatagtcaataaatttattaaccccgagttgttcgacacgttgctgattttgtggactaccactagtaatcactttgagtccttttgctactgcaattggaatagccattgcaccgaaacttcctgtcccaccagaaataaataatgtctgacctggcttagcttgtaacaattcaagagcctgaattgctgttaaagcagttaaaggaacgccagccgcttcttgattggtaagatattccggtacatgagcaacagcggattgattaaccactaattcttcagcaaatgcaccaatattatttaagggattgcgtccatatacacggtcgcctaccttaaaattagtaacatctttaccagtttgttgaacaagtcctacaaattcatttcccagtgtttgcggtaatttatatgggacaactaatttcaaatcgccccatgctattaaattatctaatggattgacacctgccgctttaacttgaattagtaggtcgtaaggtccaagcggcggcaaagaagcattgctaattagtatttgtggattctttttattgtatttagtaagttgagctactttcataataatcctcacttttttcttatctttatcaaccataacgaattaagaaaatagcgtcaataaagtagctctaacatgtatttcatgcttgctttctagcattatatctttcaatgtcttactaacaagacattaatcgcactattattcaaaggcttttgtcttgccttattttattagttacaaataaaaactgctagctattcattttttgcattattgcctacttaatattggtattttaaattttatctttctaggcttatagtaaaagtaatcaaaattacgattgagaaaggaagattttcatggctaagaaacaaacagctggtcgcgaccaacttggtaatttcgcccctaaatttgcagaattaaacgatgatgtattattcggacaagtttggtcacgggaaagggaattaagccttcgcgatcggagtcttctcaccgttaccgctttaattacaaaaggtgcttttgaacagctcccttaccacatgcaaactgctaagaacaacggcattacaaaagatgaaattgcggaaattattactcaattagcattctacgttggctggccaaatgcttggtccgcattcaacgttgctaaaaaagtatgggatgattaaaaaatcaatttaaaacgtgcctttaatggcgcgttttttattttcggcctattataaaattaattaggaattgtgaggtaattaggatggaagaatttaaagaagcttattatgatggtgaacgtccactttatggtcttcaagatgctcatttagtaaacactacttttggtaagggtgaatcaccattaaaagaaactgctaacttaactctcgatggcgtactctttacatggaaatatcctctttggtattccgatcatatcaaagtaacaaataccatctttgaagaaatgtctcgttctggtatttggtatactaacgatattgaaattactgacagtacaattcaagcacctaaagaatttcgtcgatgtgatgggatcgttcttaataatgttcactttacaaatgctgctgaaacaatgtggaactgtaaaaatattaagatgaaaaatgtatatgctactggtgattatttaggaatgaatagcgaaaacatttatgttgaccatcttgatcttgtcggaaattatgtttttgatggcgctaaaaatgttgaagttcataactcacgcttagtatcaaaggatgccttttggaactgtgagaacgtgacaatttatgattctaagatcagtggtgagtaccttgcttggaataccaagaacattacttttattaactgcacaatcgaaagcgatcagggattatgctatgttgaccacttaacgataaagaattgccgggcattacgaactgaccttgcctttgaattatgtactaatattgatgccgagctaaaaggtactattatgagtattaagaacccaattagtggtaaaatcaccgttgatcacgctgatgaaatcattatggataatcctaaaattgatccaagcaaaattcaaattatccaaagaaagtagagggtgaaaaaattatggaatatgatttcgatacaattctcgatcgacgtcacaccaattctgaaaaatgggacgttaagccaaatgagttaccgatgacaactgctgatatggacttcaaaactgctcccgaaattatgactgcaatgaaaaagaagattgattcaggcgcttttgggtatgaatatcctagtgaagaatactttaatgcggttgcttcttggtataaaaccgagcataacgcaaaagctgatccctcttggatgcgatttgcgactggtgtcatcccttctattactgcctgtgttaattatttaagtcatgaaggcgataatttcttgttaatggagcctatttacaatactttttacaattctatcctcaacagtggtcgtcatgcttttcctacccaactaaaatacgatcattctacgtatacttattctgtcgattgggatgaccttgaagacaaaatgagtaacccgcttaccacgctgatgattttatgtaatcctcacaatcctactggctacgtttggtcacgcgatgagttaatccgaattattaagctagcccaaaagcacggcatcattgttattagtgatgaaattcatggtgatttagtattaacgggtccagactatacccctactttctccttgccagaagattgtcgccagaatgtagttacattagtgtcaactagtaagacatttaatgtggcggcccttcatgctgctacgggaatcgttcctaatcctcttttgcgagaacactttacgcgcgcaatcaataagtatgaagttgcagaaccaaacctcttagcaattcctggaacaatcgctgcctatacacaaggcgcagactggcttcatcagcttaaaaagtatttattaggaaatcgtgaatatcttgttgaatttattaagaaaaatcttcctaaactccacgttgttcctggaacagcaacttatcttgtgtggatcgatgttagtgaagtaaccgatgatagtgctactttagcgcaaaaaattcgtgaaaaaactgggttaattattaatccaggaacctattatcatggcaatgggagccactttattcgcattaacattgcctatccccgtgcacaagtaaaagatggcttagaacgattagctgctgctattaaaaattaaccattaataattattatcagtaattaaaactattttcctcttggcttactaagaaattaatttattttttcgcgcttttaaatatttggacaggaatgagtgagcaccaatatcgcgaaaatcatcattaaacataaaattgtaataaaatcccccgcatgcaactttcacacatgcgggggattttattaatgatcagtttcaacctctaatactttcttcgatccagcatcaatcttaacttctttaactgttcgtccatcttttacttgaacttcccacacagcctgattttctttttcttgttctaatttccattcgataggactacccttcttagttgctttttctgcaatttggctcgcctcatcacgactaattgtcttacttggatctaatgtatatttcttatcatttttatcaagcttttcagatttattggaaattactttaccatccttggcattaactttgaccttatactcattcgcattgtcaaagccttttattgtatatacatatttaccattgtcactttctaattcaacttcattgatttgcttattttgatacttttgattaaatttatcaattgccgcttgttgatcaatcttgatatcactcttcttagctaacttttcatgtttaacagctgcttcgatttgatcatgatggccatgtattgcaactaccccaactgtgcctcctgctcccaacacaatcccgctacaaatacaggcagtaataagcattttcttagtcatttgaggaaatttccttgattttttcttatctgagtttggttgatgatcttgtcttttttcgattttttccgtcatttttattcttcccttcttaactttagttggtaattttattttacgaaataatctgccaactaaaaccaagaacaggtgaaagtatgatgaagaaatcttcatttttgtttaggaagataaactgtaaaaatcgttccaactggttcattgtcgcgaatcataatttttccgtgatatttttcaataatcattttaacaatcgaaaggccaatccccgaaccagcaaccttattggaatgcgattcatcttcacggtagaatctctcaaaaactttttggcgattttcctttgcaattccctgaccttgatcagtaacttttaaaactatttggctatcgtctgccgttaactgaacattaatcgttgaattagttggtgaatatttggccgcattttctagcaaattatgaacaagactttgaaaatcaccttttgttatgcggtaagatatattcggatttaagtcagtaataaatttttgatgatatgcaccttggagtgactcaacttcagcgaaaacaatttttgacaagttaatttctgttagttttttagtctgatgtccttctagaataagcagttcatttattaattgactcatttgctgtgcttcttgatcaatgtactttaatgacttggcaattaattctggatgcttatccccatgccttcttattaggtttacatgtcctaaaattccagcaagcggtgtcttcaactcatgagaagcattcgcaataaattctttttcgcgttgcattgtacgatactgccgtcctagcaaatgattaaaagactgggcaacctttcgtacctctaatggttgttgcggaaccgttaaagttttcaatcgattgctttggggcgtgattgcatcaatttcattatctaaattagtcaatgtttgtgtccatcggcgagctaaacgatgaatgatggggagagcaatgatacttattgcaaggttaattaacagcgtcactatcaaaagccagcacgttaattcgattaaatcatcaacattaattgctactttgacgattcgattatggtctattttttgctgccgtaaataatagactccatgccgggttaactgtagattcttgattgctaaattccgctgatcaattcgcttaaatattttatgggctttgggggagatatatttttgttctccatcagtgatctcaattgcgtcatcgtcttgacgagcaacataagcatttaaaaaagtttcctgattcttgtttctaggccaatcttcttcaattgtttcaattacttcttctgcctgctcatcagcatagcgatatattaaatcagcagcagtcacaacaaaaagaaagttaataattaccaaaattgttgcaaataacgttaagaaaagacgagttaattgccgtgatgcggttattggacgtgtgttgttcattgctcatcacctaatacataaccaatcccccgcacagttttaattaaatcacggtacttacctaacttgttgcgcaaagcacggatatagacatcaacagtattggtctgaccgtcaaaattgtaaccccatatctcgttaagaaggtcatcacgggtttggacaactcctggttctttaatcaaggcagccatgagggaaaattctttaggtgttaaatgaacttgttttccatcaaccataaattgatgtttcagtaaatttatttcaaatggtccaaaattataatcatgtttttctgctttttcttgccctaatcgtcttagagcaaccctaattcgtgctaaaagttcctcaatttcaaatggtttagtaatataatcatccaatccttgatctagcgccatgctaatatcagaggtttgactacgagcagtaatcataataattggaacattactcgactgacgaattcgtcgtagaactgtgagaccatcataaaccgggagcatccaatccaataagattaaggttatttctttctcgttaaatatttccagtgcttctcgcccatcttttgcccagataacttcatatccttctagttctaattcagttattaagaaacttgcaagactttcttcgtcttcaaccaacataatgacagctttcttcattattttgcctccaattatttgtcctatatactattttagctgttttgattgcaggcaaataaaaaaagtttcatatgaaacttttttactgataattagaatttttgttcaagccgatataaatcattcaagaaattagcaacaatatttaattcatccattgaatattttgcggttagtttatcaaccaacttagtctttattatttcatgcatttgatcatgaacttttgctacttttttcccatcctaaatttcaagaataagttagccactggactcaaataaataatactgaccaattgattattggttgatggagctgtgatatctcttggtagaaggccttacgatagatatccattgacgaatgtccattaaacatagctcgtggatagtgattcatccaatcattagtcgctatgatctgagcactactatagttatttatagcttcacctttggtaatctccttgcggagaaaccggttattgatctcattggatccacgttcccaaggggaatacggatcagcatagaaaacatgatcgtgaacttgtgttaactcactaaattctgaaccgttgtcagaggttattgtcttaaagatgcgatagtaagcatctgtgcccattttctggcgtaaatttataaagaactgatttactgcatgcgcagttttaccagcaattttactcgtgatattaactcgtgaaaggcgatcagtcattactagtacaacactgtcattaccgtttttctgtccctgaactgtatctagttcccaatggccaatttcggaccgttggtccgcagtttgaggtcgttgagcaatattaggacctaagcaccttttagcttgcggatgagttcgatgatgcttacgtttaggcttttcaaagaggtctaaattggacgtacgaagcacaccctcattaatccattgatataaagttacaaccgactttgggatcagggtgccatcattcattaaatctcgagccttataaataaccgcttgtggggagtaatggtggtcgtcaaactcaccaagcattagctgatcagctaatcgtaaaaattgctttgaagaataatataagcgacgacgaccagaatggcggtgatgttcaagatatgtggcctgaccagcttcataactatagatgtagtaagaatattcgtaaatcttaccattagatttttgacgacgaagttggcggaccgtaccacggttgagctcgttattaattgtttgatgattaactcctaattggcgaccaattgcgcgattggaaagtccttgcgactttaaagtcgcaatcatcacacgttcttctttagtaagatgagcattctttttatgagtagtcaataaactagtagacatggtatcatttaagtgcgtcatttgacggacatcctttcatataggtttggttcacttaatatgatacctgatgtcacgccgaatggcgttttttatttaccaccaactgggtggctaacttcattctataatccaccacttttttcccattactcgttaatgaataatatattttctttttatcatcaggatgttttactgaaggaagtgatgcaatgtcgatggggcaaatttttaaccaggtcgtcattattttcttactaatgcttttaggggcagttattagaaagctcggatttccccatccgcaatcaattaatgacctaacaaatattacactctactttttatcgccaatcgtaattattaaggcctttgaacagccgttttcgcgatcacgattttatcaattattactattaattgttggtatctttttgacctattttgtttccattttgattgcaaaactactttttcataaagtaaaggaccaaaatattcgtcaaattgcaacttatggaagcatctattctaacaatggttttatgggcgttccattagcacaaggactttttggaagtgtgggtgtcttctatgctgtcgcttcaatgattggttttaatgtcatgtcatggacccagggaattggaatttttcaaaaacggcagcctcatgattggagaacacagttaaagaaaattattttaaatcctaatattattgctattattactggtcttttcctattcattagttcttttcggttgccaaaattaattgctgattttattgattacaccagtccagcgtttactccactatcaatgattgtcatcggaagtaatcttgccaatctaagtattaaaaatatcaaattaccaactgtactctggggaagtctcttcgtaaggaatattttcttcccaattctagggacaattatcttattattattgggaatcaccggtgttccactcttcaccacagtaattcttagtgcatgtccagtagcaggattagtcgttctttttaccttacaatcaaatggggatggacggccagcaaccgtcttaatgagtatttcaaccattttgagtttagtaactattccattagtctattggtttgctagtttgtggtaatgatatatacaatctttgaataaagtattaaatataataagcatttcaaataacagcctccttaatctatgatggaattagatacgtggaggctttataaatgaataaaccatatattacaattgaaaattaaatgcataggatcgggttaaattactgtgattctatgcgtttgtgctttaaaaacaagaaaacgcaagaactctcgcacacactttgggtatttaaaccaaagtagcgaaggggcttgcgtaatgaaatttataaagttgaagtgcaagataaaaaggtatgattccaatatccaactgggatcataccttttattctctagattactgctttttaagtttctttagatagaaaaacaagataaacaatcctattactatacacgccaatgcacctggccataaatctattcgaatgatcaaaataaatatagcatataagattattgctattccttctaagaaaaaacattgtttctttaaacaactaattagccataatattgcacaaagtaaagaagatgtagaagcaataatattcttattgtatgcacaatatacacaaataatgaaaaatattaatacttcaattatattccacttattcttttttaaaaaggtggattatagaatgaagttagccacccagttggtggtaaataaaaaacgccattcggcgtgacatcaggtatcatattaagtgaaccaaacctatatgaaaggatgtccgtcaaatgacgcacttaaatgataccatgtctactagtttattgactactcataaaaagaatgctcatcttactaaagaagaacgtgtgatgattgcgactttaaagtcgcaaggactttccaatcgcgcaattggtcgccaattaggagttaatcatcaaacaattaataacgagctcaaccgtggtacggtccgccaacttcgtcgtcaaaaatctaatggtaagatttacgaatattcttactacatctatagttatgaagctggtcaggccacatatcttgaacatcaccgccattctggtcgtcgtcgcttatattattcttcaaagcaatttttacgattagctgatcagctaatgcttggtgagtttgacgaccaccattactccccacaagcggttatttataaggctcgagatttaatgaatgatggcaccctgatcccaaagtcggttgtaactttatatcaatggattaatgagggtgtgcttcgtacgtccaatttagacctctttgaaaagcctaaacgtaagcatcatcgaactcatccgcaagctaaaaggtgcttaggtcctaatattgctcaacgacctcaaactgcggaccaacggtccgaaattggccattgggaactagatacagttcagggacagaaaaacggtaatgacagtgttgtactagtaatgactgatcgcctttcacgagttaatatcacgagtaaaattgctggtaaaactgcgcatgcagtaaatcagttctttataaatttacgccagaaaatgggcacagatgcttactatcgcatctttaagacaataacctctgacaacggttcagaatttagtgagttaacacaagttcacgatcatgttttctatgctgatccgtattccccttgggaacgtggatccaatgagatcaataaccggtttctccgcaaggagattaccaaaggtgaagctataaataactatagtagtgctcagatcatagcgactaatgattggatgaatcactatccacgagctatgtttaatggacattcgtcaatggatatctatcgtaaggccttctaccaagagatatcacagctccatcaaccaataatcaattggtcagtattatttatttgagtccagtggctaacttattcttgaaatttaggcttattcttttttaaaaattaatcaaaatcatcaaaactccccatgatagtcgaaataacttttccctccgactctaactattctagaagccagttcagcctctaaaataaaatataaagaaaactattccaattaagatcaaaattacagaaactatccatgtgcttggatgaactataaaaagtaataatccatatattatgaaaaatagtgcttgcagatataaaaatttcttccctagattactaattaatagtgaaagtccacaaaagattgacatcgatatcatgccaaaattgtaatcaaatattaaataccccgaaatgtcaatttaagttagaaagaaaatagttgctcatcagtgacgtaagacatgaatacttcatatggagttcgatagcctagtgatttacggggcaggttatttcgcttactcatcagttgggttaccaattcatcaggaagattgcggaaatctagctgtttcgttaagccatcccggcgtaaaaaaccgttgttgttttcgttcagccctcgttgattgggagcaccaacttcggcaaagtaagtgtgaaggtcaaattgattggcaatctcgcgccagccggcgaattcttttccgttgtcaaaggtaatcgatttgaagaagtgccgcgggaatttccgaagccactgacttaagtgttggttaatcgcatcagccgtcttttcgtgcacattgagtacaatttcgaccttcgattggccagccttcccacggcgctcgacatagccattcgggtgccgcttacctcgcatcggcaaggaacggacatcgaagccgaactggccacgttcaaacatccggtaaagagttcgcaggttacaactaattgggcgctcagcgctcccaataatggtatcaggcgtccacccctggtcaattttgtcgttgatataagtgagttcagccagtgacaactgagtacgttttcggccacaacgttgcttattgcgcatatagtgatcttgataatcagcaattgaggcaccggtttccaggtaacgataaacgcgataaacggtttcggcacaacggttgatcatttgggccactcggtacgctttaagcttttgcacgaaagaatgggcgatgattgtcagctcgtttgtggtaagatgggtgtaagtcatttgtggtttcctttcttttgtttaggggtattcaaaagtctaccacaaatggcttttctatttttctaacttaattttacaaacggcgtatcaaaaaaattctctaagtcctttagttaatgaagacttagagaatttttatttaaagatctctcattccatataattatggagaatatcatccgaagctgcctttaattttagataatcgatattattagagaatagcataatcattcgtttcgtcttgtaatcagcgacaaagcaactgttatatccaggaatactcccatttgcgcgaataacgtccccatcaaagtaaaccccaccaaaataggcaacttcttgatgctgcgcctgttggtagtattcattgatcattttgggatctttcagcacctcattatatacaaacttccagtaatcatttggcgatataaaaaggttccctgccccaaagtctgaggaggtcgttacagttacccggtgccaatcaactgttggatccattggttgcggaatttcttttttggaaacctcagaaaaatctttaatttggtgaagatggagcggtttagcaaagttttttcgaatataggtattatagctttgatgcgtttgcttactaataatggctgccaagatttcataatcaacatcttgataatcccatgtatgcgtataatcatacttgagatgtttaagcatataagcaatttgggctttttggcctctaagtggttcaaatggacgatcattattaatcaagccactagtatggttcattaattcccgaatcgtaatatctttactgccatcaatctgcgggtaatacttacttagcgaagtgtcccaatctaattgctttttttgctttaattgataaacagcggttcccgttacaatcttttgaagcgatgccgtgggaaatagtcggtccgcctttacgatctgatccttattcgtggtttcattattttcaatagcaatcgttttccaatctttgccattaactagcatcaccccattaatatgatggtccttcatataatcttgaagttggtgttgcgtttgtttgtcaactatttctgcctttacctttgatggcgtggtcaataagaagatagcaaaggaacaaagcgtcaaaaaaatatacaagttaacttttttcataattataagtattccttccaggcatccgttttcgaaaaaatatctatctgtattatacaaattttatcccccatcttacaaagtagaataaaatctgatttttattactaaaacactttaaattcattcgatttatgttaaaattctaacgtcaataaataaaaaacgcaaaaatagttcgtaaataacgaacattatcaagggagagctagaatgaataacgacgtcgaaaaagttttatatactcaagatcaagtcaatcaacgcttagatgaacttgccaatacacttactgaaaaatatcaagatgaatttccagttttagtttccgtaatgacaggggcaatgattttcactagcgaaatgatgaagcgccttaatttcaagttaaacgttgattatgttgacgtctctagttacgaagaaagttcaaaatccactggaaaagttaaattaattcaagatctttcccacaatattaagggtcgaccagttattattatggaagacattattgatactggtcatacattaaagtatcttgctggtcttttcgctgatcgtggcgcgaagagtattgagatttgttccttacttgataaaccggaccgtcgtgaagttaatattgaagctgattacgttggttttaaagttccaaacgaatttattgtcggatatggcctagactttaatggcctttaccgaaacctgccatttgtcggtgtgttaaagcgttccgtatatgaataatagttaaaggctgagagaaaatgttatttctttcagctttctttttggctttaaacatctaaacgcgatatagtacagttaggctaataaaattgataataattgatttttggtaaaggaggggtaatcattgcttaggcttgactggtgtttacgaatgctcatggctgccttatgtggtggaatcattgggtttgagtgaaaaagtaaggctaaaatggctggaattcggacccatgccctaattgcggtggggggcggcaatggtcatgattatttctaagtatggcttttttgatttactgaaagttacccatagcaattggaacgttgacccatcacggattgccgctcaagttgttagcgggattggttttttaggtgctggaacaatcattaatcgccacgatgaaataattgatggcttaactacggcggctggaatttgggttaccggcgcaatcggtcttgcctatggtagtggtttatacagtattgggattatcggtacctgttgcgttcttttagcagaagttattggaaaatatctagatcagtttgcacttagacaaggtaaaggattctcctgctttattcaattagaaggaaatactgatgatttgcatgcacttattaatcagctaaacaaaaaatattttgaagttccgcttaaatactcgatctatgattatggagacggaaaaatctcctgtcaactttatggtgaattaagatctggcttcaaatcagaaaacatctttactgaccttactgagctgggcaacattaaaaaagttgagttagaataaaaacataggaagtgacaagatggcttataattttagaaaagagtagaaagaattgtatgtccccggaaagaatcccagcctaatcaatgtaccaatgatgaagtatcttgctgtgcggggacatggggatcctaatcaagaaaatagtgagtataaaaaagcaattgaaaagctctatgctgttgcttataccattaaaatgagcaaaaaaggcacctaccaaattccagattattttaattttgttgttcccccactagaaggactatggtggcaagatggtatcactggaattgactacaaagttctatttcattgcaatgattcgccttcccgactttgttactcaagatgtttttgaatgggcaattcagaaggctagcgaaaagaagcagctcgatttacataacgtagaattcctgtcaatgcaagaaggcctctgtgtgcaagtacttcatatcgggtcatacgatgatgaaccggcaacaatcgacaaaatacataaatttattgcggaacaaggtttacaagtagatattaacgatgatcggcatcaccatgaaatttatttgtcagatcctcgccgtaccaagatcgaaaatctaaaaacagtattacgaattccggtaaaaaacaattaaaaacactattaataggtgatcctctattagtagtgctttattttttgccttgaccggtgagtaaatactcactataatgaaataaaaaagtaagcatttactcaccaaacagaaatgagggaactaaatatggtagaccttattcaacttagtcacttgagtaagaaattcggtgaccgtaccattcttcatgatattaatttaaccgtcactcccggtgaaattgttgggttaattggaccctcgggttcgggaaagacgactgcaatcaagacaatgttaggaatggaaaaagctactcaaggaactgcacttgttcttggcaaaacgatgccaaatcgaaaagtacttagtaaaatcggctacatggcgcaatcggatgccttatacgaaagtctttcggctaaagagaaccttgaattctttggcaagatgaagggggtaactggcagaaaactctccgaagaaattatccatgtcagtaaagttgttaatcttcaaaattatctcaatcaacgcgttagtggttattctggagggatgaagcgacgactttcactggcaattgcgttgctcggacagccagaactattaattctcgatgaaccgactgtgggaattgatcctgctcttcgccgccaaatttggcaagaactccttaaactgcgtaatcaaggacagagtattcttatcactactcacgtcatggatgaaacggaacttaccgaccgagttgcgctacttttgcatggggatgtaattgcatttgcttctccaacagaactagaaaagcgatatggtgtaccaacgattgaagatgtctttctaaaagctgaggaggaagaagcatgagaaccctagcaatcactaaacgcgtcttaaaagaactatttcgtgacaaacgaaccttagcattgatgtttttagccccaatcttaattatgtggttaatgaacgtaatgttttctgctagttccaacactaacgttaatatttcaacagtaaatgtcagccagtctattgaacgtaaccttaaaaaagtggatggcgtatctgttacgcctagctcgattgaacacgcaagaaaaaagctaaaagataattctacagatgccatcatcgaatatgatcaagcaaaaaacaaatataatgtgacctatgcgaatactgactcaggaaaaacggtattaacaaaacaggcattgaatgctgcgattacaaaaactaccattagctcattagcaaatggtgttcagcaattacaaacaattgttaaaacgacaaatcctaatataccgattgcaacagctaattctggcaattcaccaacaatcagtaatcattaccaatatggcgatgccgacactggcttcttcgctaaaattgtccctattttgatgggattatttgttttctttttcgtctttttaatctctggaatggccttattaaaagagcggacttctggtactcttgaccgcttgcttgcaacgccggtaaaaagaagcgaaatcgtgtttggctacatgttaggttatgggatcatttcaattattcaatcgactgtaattgtcctagcaactgtttggcttctaaaagtagaagttgtcggaaatgtctttaacgtcattatcattagtgtgctcctagccctcgtcgcccttgctttcggaattttaatgtcaacccttgctaattctgaatttcagatgatgcagtttattccgttagttgttgtgccccaagttttcttctccggtatcattccgctcgactctatggcccactgggttcaatatattggaaagattctccccttaacctatactggagacgctcttacccaaattgtcatgtacggaaagggcttaacgagtcttggcggcgatattttagccttgcttatcttcctcgtcgttctactatggctaaatattattggtcttaaacggtatcgcaaagtataattttattaagaggtgaagcagatgtctcaagttctagcaaattatgaagaacaactcgccaatgctaaaatgcccgcggggaaaaagaaagtccttactactgcattaaagctttttgcaaataatggcttccatgctaccactacggccaaaatcgctaaacaagctggtgttagtgaaggaacaatttataaatatttttcttcaaaggatgatttactagccaagttattgcaacctattttgatggaaattaagaacaacttttttagcaatcttgatgataaaatagacttatcttcattaataagttttattgttactgaccgaattcattttattgaggtaaattttgattttattcgattaatctttcaagaaattctaacaggtcaattaacagataaatcgtatcaagatttctttagtggcaatgatggcgttcttgtcaaactcaaaaaattacaggcaaaatttcctgaaattaatccaaaattaaatccacctcaactcgctcgtatttttattggccctattctcacttatgtcttgcagaataagttattaggcctgccagtaaataacgatgatcttgacattattcaaaaacaaattttagcgaatttaacgcttaaatattaactaaaaaagcatcagaagttgtgacttaacgacttctgatgccttttatgctacaaatcaattatttcattcagtttatacttaaccttcatgttttcccagccatacttaccaaagcgttctttcatctctttaggcgtaaacaacttattgctatcaaatgatgcttcaatcatttaacgatcatgtttaatattttgttgtaattgttgggaattctctttcatctaaaacacctcaatattttttctacttaacatccctgttatattttcacttcaattcttcatatagtggggtaagttgcctaataactgaactgatgtattcctccatattattaacttggtcttttccacgaaatgcaaatttgccaagcaaaaaactggtctttcgtgcatcagaattaaattgctgctgagcatcccgactattgatgtatttagtcagtgacatatgatcagaaaattccatctcatccttatcccaaaggtaccagcgtgtggcatcaatatcattagcccattccggtattttatccagtaattgattgtattcatccggcgtcccttgtcgttgctcactcttataatgttgaaacattaggtagacctgtaactgctttttatcaagcatcaccccaatacaggaattatagtctgctaacgatgctaaacgataagaggcccagtaatgatcacgcaggttccagccgttcgtccaactctcaacgtgaaccttcgcgaattcgcccgttggtagttgactagcgacagtttgatttaccttcttccacacttgccaaacggctttaaacttctcttttaggtctgcaacttcttctggtgaatgattttccttaatcttcttaaaggaaaattctggctggtcaaagattacaaacatactttcagttaatgctgtcattttagctcgcccctttttatccaagaatatcataactaaaaaagctaaactatgactcttaatttacacgaatcataatttagctttatagcttcattaaaacaaattcagcatcaccatataaaagccagttccgaccaagatcgatagtggcatatttcttttccaaaggtgaataaataatgttactaagccggcaacgatttctaataatgccttactaggctcagcaaaagaaatattccgataacaatagattactaatactcccatgattgctgccggaaggaatttccccagttcttccaggtaaggtgataattcttttgactgatcaaaaatcaggaatgggataaagcgggtcgccatcgtgacgactgctgcgattaaaattgaaataatttgttcagttaatgtcattttttctcctcgtgattaagtaatttaatgaaaacagtgcgacaagtgttactaatgtcactaatagaaaaacattcttgttgcaaaatagtaaacaaataattgcaaatgctaaaccaatcagagcatcacgctgagttcgggcatttttcaactgttctgtaaacaacacaataaaaagtgccgtcattacaaaatctaagcctgctaagtttaagttaatcatccccccaaggagtccacctaaacctgccccagctacccaactaaaatagttgaatgcggttatgtaaaaataaacatatgagcgatcaaggctatctggtacttttaacgttgcatttaaggaaaaagactcatcacacattccaaaaataagaatcggctttaactttcctgtattggaatatttttttaacatcgtaatgccataaaaaatatgtcgtgaattaacaagggcagttaaaatgagaacagtcaatggctgaaaactctggactaaaagattaccaattacaaattcgactgatccagcaaaaatggtcgcggccattaataacggatataaaaaattaaagcccagtttatgcatatatatcccatagccggcgcctaaaaatagaaagccaagcattaccggactagttttttgaaaagcgtaacgtacttcctttctcatggacgaattctccctccttaaaataacttgaacttattttaaacaggagtattttatccatacaaggaattaattgtatggattacaatattggagtgataaagtatgcctattaatgatttttcccaccatcagcttacctggtatcctgacaaaaataagctgacgcgaccaatttataaaagtttgctcaatcaactaaaaacagcaattgagcgtggaattcttacacccggaacgaaactgcccccgcaacgcgaactcgccgattatctcgacattaatttcaccaccgttactcgtacttacaaattaagtgcgcaacttggtttaacttatggaattcatggtaaaggaacctttgttaactcaaatggtatcgatccgttaactgccaattctcctttgacccgtaccattgatcttggctttgttgcttcctttgaacagacaaaccacctccttgacaatattcttagcaacaccgtcaagcaaggcgcctcgcaacttctaacctatgactcaccaaccgggcgtccgattgataaggaggctttccagcattatcttgactggcttggcgtgagattaactcctactcagcatatccttattacagcgggaggagaaaactcacttacattactgttaatgaccttattttcaggtggcgataagattgctgtcgacgaatttacctatgccaacctgattgcaaccgcgcaactaaataatctccatttagttgcgataaaaaatgatcaaggcgggatgaatattgaagcattaaaacacgcttgtcaaaacaacaatctagctggcctgtatctcatgccggaatatagtaacccgactggcgctgttctctcgatggctcgccggaaagaaatcgcaaccattgcgcaagaatacggactgaaaataattgaagatgactacctaagttttcttagtaaactcaatccagaacggccgcccaaaataatggaattactaccagaccagacttgttatgtttgcagtatgtcaaaagttcttgcatcaggactccgtgttggttatctagttttcccggcacagctagcccagcaaattaaaaatggtttcttcaacacaacagtcaaaacgtcaactctcaatacagcaattgcatccacggcaataaaagagcatatcgtccaacaaataattcaaaataaagtcaaccttgccaaacaagctaatatcctttttgaacaatatttcccgactgctcctacaaaccaattaaccgactatgccttttttcgtcgattaccgcttaaaagtattcaaaatacagccaagatcgaacaagcccttgctaatataaatatccgttgttttggctctgatcgttttcaaattaacgcttcttcaaatgaccattttctccgtgtttcattgtccgcaaataagtcacttgatgagttagaaacaggcctaaaaagattacgcgagtttttacagaaagctaatttaatttaaaaagtgatgttaagaatttttcctagcatcacctttacttttttgtttagcttattttctaaccgcctcgtaaatcatcccatttcactacataactctcttccctgccatccaagtttcattcacgtggatatttttaagttcactatgagcaactgtaaagatatcatcatttaagataacaaagtccgcggcctttcctacttcaagcgtaccattttcatcaaagccaccaatttttgcaccatcccgagtataaccaagaatagcttgtggaaccgtaattgcttcttctgcgttaacaacatcacaattagcggcctttcttgttacagccgcataaatactataaaacgggctatcaggttctgcccatggcgtacatggggcatccgaactcaagcctaacattgcttgagaattcaacattgttttaacgcggtaagctaatttaaactgggctggtgaaagataatgacgataggattcatcttccgcaaagaaaaagattggttgcgtgactaacgcatagttcattttactattggcaatctctgcaaacatttgatcagtcattaaggatgcatgttcaatacgaaccgatggcattgtggttagccatggcgctatctcttttgttacatcaatcactgtttgaattgctttatcgcccatcgcatgcacagctagttgaagcttattatcacgcgccatctttactgctcgctgaagtttttccactaaagtcaaactaactcccatttttcccgatggataaggatcagtattataggccgtttcgccagaaatactcccatccataaatactttaattccagcaacgcggagtttttcatccccgcttggttgcagtccaacctgcggatcaatttcatcaaagacatagtagatcgaggctttcggaccaaacccttgcttaactgcatcttggtatagttttaaagaagtatatggcttcatccggcccatcatttcaccaattgccacaattccctctttaagatagtgttcggaactattaaccatattagctacgtcgttctcatagctctgtgccgatttagcccgaataagaagttgtgaggcagctatttcgcgcataaaaccagttggtcgtccatcagcaaatcgttcaattttcccaccaaccggatcaggcgtattttcatcaattcctgaaagctctaaggctttagaattgccgacagaagagtgacagtcagaacgataaataaagattggttgcgttgttgaaacagcatctaaatcatcacggttaggactccgatgttctgctaattttgtctcatcaaccccccacccttcaatcggtactgtaccctgtcaagtttacatactaaataataaaaattaattggctttgccgtaacgaaattccgttgcagtaaggtcatttcttttagctgaaataaatgtatttgtaaagtattcaattccttcagccactagtgtttgaagttcatcaagtgtttgtgacttagatgaatgcgctagccaaattgctttaaagtcggcccaccagtgctcgataactgcgttatctgctggtgtgccaggagctgaatagctatgttgactattattgctagttaaatattgattgaacgccttagaagtataagcagctccgcgatcagtatgaataagtggggctaatacaccttcttgtttctgagctttcttgaatacttgaattgctccctcgctagtttctgttggggtaattagccagctaattggaaattgaccatataaatcaagaaccacatgtaaacgaactttataattatgaatattgtaggcgagttctgttgtatcagttacccaaacctgattagctgcttcctgtttaaattgacgattaagtatattttcagcttgataggtttgacgttccttgtcgcgttttcttttagcttgacgatagtcagctttaatcccatgttccttcataattctaataactcgttttttgttgaccaaatatccaagacctgcgcgcttaataagacgagtcattttcccatagccaatactttgcttattagttttctcaatttctttaatcacgcggtttgtaaaattaagttagaaaaataaaaagccatttgtggtagacttttgaatacccatacatcaaaagaaaggacaccacaaatgacctaccatcatcttaccatagacgaactaacgatgatcgctaattttcgtgaccaaggagtaaaagcctaccgggccgccaaacttttgcaccggagcttagaaaccgtctaccgagtttatcgctttctggccgccggccacacgctccaagaatattaccaacactatcgtgaaaacaaggctcattgcggtcggaaggctattcaattgcccactgatgaggtaacttatatcaaagccaaagtggctcaaggctagacgccagacacaattatgggacgcgctgaacggccactcagctgtagtatgcggacactttaccgccttttcgagcggggcaattttgatgtgcggaccttgccgatgaaaggcaagcgtcgccccaatggttacgtagaatggcgggggaaggccggtcaacttggccaaagcattcaccaacgggctatcgactttcccaactttaaccgtgaattcggccaccttgaagccgacaccgtccagggcaaaggacatcagggcgccgttatgactttggtagaacggacttccaaagtcgaagtgattcttaacgtccatagtaagacggccaccagtgtgatccagcacttacaggaatggttggcaaagtttccaccccacttcttcaagtcgattaccttcgacaatgggaaggagttcgctgactggcgagcaattgccaaccaatttgacctccagacctactttgccgaggtgggggcacctaaccaacgggggttaaacgagaacaacaacggccttctgcggcgcgatgggctccacaaaggccgcgatctccgccacctagctgatgaagaggttgctcaaataatgagttaccggaacaacattcctcgcaagtcattgggctatcaaacaccttacgaggtattcatgaagtatgtcactgatgagcaactactttttttctaacttaaattgacatttcgggataaaaaagaggttagagcttaaaattgctcaacctcgtaaagtttgttactcattaaaatgcctgctcatcatataaagggatcgcatttgaccatttatttcagaaatctgtggtaatttacctcattctttgtacccacaggaggtaaaaagatgatagcttgcttgattttcaatataaatatatgcaattacggttcttatatctagatgatcttcaatttgtttttgcgcatatattaataaatcacggccaagatgttgctgtcgataatcttcataaatataaatagctatctgtgccgaatgatcataggcgagatgcggataaaaatactcaagagcacaccaggcgattacttggtcatccattgttgcaacccagattggatgagtattgtcaaactgcataaatcattcacgtcgatcagcaacttcgatcggtgcactctcatcgttgacttgcagcggaattgcttgattaaatatatcgacaatcgctggtagatcatttattgttgctaacctaatttggtaatccatatcaaagcttccttacagtatttttacccactaattattacttatcatagaagtgctgccattctttattaacgttttcgcgagtcgtctttgtcccagtccatgatggaacttttacaaccccatcaatcttactcttaggtacaaatccccagtaacgaccatcgtttgaaacgctccggtgatccccaagaacaaagtattcacctttcggaacttttgtggcaccattattctttaaccaactgttctgaactgagatactacgcagtgtccagtttccagttccggttgttcgttgactcttgctaatgtagtcttgattaatctttttgccgttaacataaatgtttccattcttagagctaacagtatcaccagggagtccaattactcgcttaacataatcggttttaactgatacttgcggatcaatgccattagcatcaaatacaacgacacttccatgatggattttggcagttttcaaacaaaatactcgttcattattttgtaagtttggttgcatggatggtccatcaacccgaacaatttggaagaaaaactgcttaattactaatgcgattattaacccgattagaatgggaataatccaactcattgcttcacgaaatgctttcattataattcctcaatttctttatttaactgttattaatcatacaactagtaataaaacctgaaaagttatttataataaataatatattattttcacatttaataacatcaaaaagatattaaggttcaaagggagcgagacaaaaggcacttgtgacttcgttttcgagccccgcaagcaacaataggcctctaaggttcggttttgccggacgttagaggcctattgttgtactgcgtatttgctttttatgaaagtaacttaacttatgtcacagtcccttttaatttttatttcttttcgacaaagtacttttcgaagttcttttgatagttatgattaatccgttgttccattaaccaccgcatgaaattcatgtccttgtcataatggaaagttgttccatagcggccttctttaataagcttctcagcctgctttttaatttcattatttttagcatactgaaggaaggtcttttttgaaacccccagccataacttatagttgctttcatctttgtttccataaatcgtctcttgatcttttaagctatcaaaaacgtaatcttcaacggggaaagtagcaagttgatagccatttaatgaaacgaagaaactactacgaccttggcgaggattgaggtcaaataccttgaattggccatcacgacggtcatatttcaaatcaaagttaacaaatccagtaaattcaatactttcaaggaaattcttgatattgtcatagatttgttgatcatatgctggcataatcgcaacgtaattaccaacatttgctggattgcaatcttcaagtagcgggtgaccgagacacatcatctttaccttatgatctttatcaacgtaacaattgatggtccgcatattactatcatcaccagggataaattcttgtaaaacgaggtcgccattgtatggactatgctcatagataatctcaagaacttccgctaatctttctggtgtcttaataatataagccttttcatacccttcaaagtttcccttatgccattgcaccgcatcagcagccttcaaagcaattggaaattcaaatggtgatttatagttcttataatcaaggtctggttttaaaatatcggttttagggtaaggcaaaccatacttttcgcagacattgtagaacttctctttatccgttaatgttgctacttcatcataatcagcatacgggcagaacatgtgctgcgaaagttctttacgatttttcgcaactaattcagtatagtcatctccacaactaattaaaacggtcttcttgccttgcttagcaaactcatctgccgctttaattaataccttcgtaaacaattccggtgattgtaattgttcattataatgcaactcgacaatttttgaataacgggttggtgccaatggttggcgagcatataattgcgacttaatcccatatttttcatacatcgaccgcgccattccgtaagcattgaaatcactacctagaatcaatggaacaaaaggttgttcactcattagattcccactcctctttatctttctaaatcattaatataatcacgtgcaatcttcacatcagttaggtaagggacatcttcaccattaatcttctggtaaggatcttcacccttccctgcaaggactacaatatcatcatttccactaccgtcaattgcctttttgatcgccgtttcgcggtccatttcaaattgaatatgtttaaccttatcatgatcaatataagaatctatttcccgggcaatagtcatcggatcttcaaacccgggatcatcagtcgtcaaaattacctcatctggttgttcttcagttaaagcttttccaaaccctggacggcgcgaaatgcctttatcaccggttgctcctaagacaactgttactttaccagcattagtttgtcgttttaagaatgccaagagtcgcttcaagctagcgtaattatgggcataatcaacataaattgttccatgagtattactgttaatcatttccattcgaccacggatgtgaacatgattcaatgtttctacagcatcgttagcactcgccccagctaacccactggcaatgattgcagcgaccgcatttccttcattataatctccagggacactcgttttataacggccatctaagttcaactgctttgctttctcagttaaggcggtcaactcaaattcactttcatgaagatcttctaaatcatttcgatattcaaaatctatttgggcattgtcaggtaattcgatgtttgctcctcgccgtgcaaataagaaaatgtcttctggttgtgtggttgccttagcagtgtaataaacatcagtaaacttttcagtttctgcattgattaagcatttagcagaatttactaataattgttccttacagtgaagataatcagcaaaagttgggtgctcatttcgtccgatatgatctggcgagatgtttaagaaaattccaacatcatactttaaaccataaatccggtttttcttgtatgcttgcgatgatacttccattactaagtgcgtcattccattatcaacggcagcgcgcatatcatggaaaaggtctaaggattcaggagtagtcaaatcagatttaaattcatcttccggcttattgcctaaaatccgatcaagcgttgaaaaaagggcaatatgattagcagtactttgggctaaaatatggtcagcaaaataagccgttgttgttttgccttttgttcctgtaattgcaataatgaacaaatcattttgtggatagtcataaaatgctgcccccagtaaagacattgctttttgttcgtcgttcacgataatagctggcaatccttcgccttctggatattctttttcagccacatacgcaatcgcacctttttctttagcggatgctaggtatttaggcaaaaaatttcctttacaaaagaataaagttcctgattttaccttccgtgaatcataggacacgctagttgcggtaaaatcagtcaaattactaacatgatccaataaatggtgctcgcacaataatgctaaagcaggtgtaatatgcaattccatcttgcaaatgactctccttcaatctaatctgccctatattatttcattttttatcataaaaataaataagggttatcaattaacaaaaaaggagacttagaagagtcctacccttcgccagcctcctttaatatttttctatacttctgttgtagccgctttttgtgcgcggtcaattcccgattcatcaggtttgaagttatcaatgaaatataacttataccacgttaagaaggtgtagattgtccaaatcttacgacgaccatccaccttgccttcgaagttatcatcggcaagttttagaagcttttcttgatcaaagaactcttttacgaagtcttgttcaaataattcacgtacttcttggtaatacttcttttctcgaagccatgcacggactggagttgggaagcccatcttaggccgcgtagcccattcttccggtaaatgccgattagcagccatccggaatgcccactttgtatccttatagttaaagaggtacttagttggtgtcgtttcagctactttcattacctctttgtcaagaagtggtacccggatttcaacagagttagccatactcatcttatctgcctttaaacaaatatcgccaggcatgaaacggtgtaagtcaacatattgcttctttgcgacttcatcgatatctttatcttccatcttatcaaaaagtggattaagaatgtcggcaatacttggtccgcaatcaaattctggttgcaagtagtcagcggcttcttcaggactaaagatgtatgcttgaccaataaaagtatcccgtgctggcgctaagttgcgatacatatgctcttggccgtggaagtgtttcccatctaaccacttagcaaacttataccgacgttcacgaggcatcttctttaattgatcagttacccaacggataaatttaactttcgtattaaaaccataatcaatgtatcccgcaaacaattcatcggcaccttcacctgaaagaagggccttgtagccgttatcctttgctaacttgttcaagaagtataaaggaacaacagatgggttagaatcgggttcatctaggtagtattgaatcattgggaatgcgtggaaagcttcttcgttagtcaacttttcatcagtattcttcaagcccatcttagctgctaattcacgtgcttgtttggtctcatcgtaagtactatcaaatccgattgagaacgtattatctggacgcatcaaagccgttactaaacttgaatcaacccctgcggaaaggaatgagccaaccttaattcctttatctgcaaaggtatgtgccttaacagaattcttaacaacttcgtcaatcttgttaacagcttcatcaaacgtctcgtcttctggctcaaagttttcgtcccagtattgggtcatttcaaactgaccgtctttataagtgaagtaatgcccctctggaagacggtaaacacccttaaagaaagtttcttgagtaactgggtattggaatgtcatgtatggtttaagcgcttctttattaagttccttcttaaagttaggatgatcaagaaatgccttaatttcagacccaacaaagaaagtaccgttcattttagcgtaatacaatggtttaattccaaaatggtcacgggcaccgaacatttctttagtcttaaaatcccagataacaaagccaaacattccgcgcagcttgttaacaacatccttgccccattcttcatatccgtgcaagattacttcagtatcggcatgtgtcttaaatgtgtgacccttactgattaattcttcacgtaattcttcaaaattgtaaatttcaccgttgaattcaatggcttttgagctatcttcattaaagattggttgattaccagacttaacatcaataaaactcaagcgccggaagccaagtgctacatcatcatccacatattgaccttccgcatcaggtccccggtgaataatccggtccttcattttttggattaattggtctttaatttgtggtttttcattatcaacaaatgcaacaatcccacacattataaatttcctcttctttctcttaaattcacggatcacaaaatagttatttaaaattcgttattaaaacttgaacctagattataccatataatgccaaacttaagtatattatccatttgctttaagaaaatcataataaaatctggagagcggagtcattactctgtttctccagattttatttcccaggaaattttatttacgatccttcttggaaaacttcccctgacggacgtaaacacttaagattgcaatatcagcggggttaactccactaattcgtgaagcttgggctaaagtttctggacgaatcttttcaagcttttgacgtccttcagttgctagaccatcaatatcaccataatcgatatcatctggaatccgtttagcttccatccgtttcatccgttcaaccttaacttcctctttcttgatgtaaccagcatatttcaattgaatttcaacctgctcaatcacatgacgatcaagttcctgttctggtgctggaatgaattcggccaacgtttgataatcgaagtatggtcgcttcaagaggtcagctgccgcaattccatcttttaagcgattatccccgtgtgcttcaataaattcgttaaccttatcatcgcttggcttgagcttaatttcttctaatcgtttgatttcagctgcgacttggcgcttcttctcttccattttagcaagccgctcatcactaactaggccaacattatgacccatttccattaaccggaaatcagcattatcatgacgtaaaattagccgatattctgcccgacttgtaagtaaacggtaaggttctttcgttccctttgttactaggtcgtcgatcatcacaccaatatatgcatccgaacgcttaaggacaaatggttccttgccttgtgcccgtaatcctgcattaatccctgcaattaatccttgccccgctgcttcttcataacctgaagaaccgtttgtttggcctgcagtatagagattcttaatgatcttggtttccaaggttgggtgaagttggtacggcgcaactacatcgtattcaattgcatatccaggacgcatcatttctgcattttctaaccccttaattgagtgtacaatcttttgttggatttcttctggcattgatgtcgaaattccgtcaaggtaatattcatccgtatcccggccttctggttcaaggaaaacttggtgccgcggtttatcagcaaaacgaacaatcttatcttcaattgaaggacagtagcgtggcccaacacccttgataacaccagagaacattggagcccggctaagattttcccgaataatggcatgggtcccttcatttgtataagttaaccaacaagataattgttcgctaattggaatataggcactatcaggagtatcaaaactaaagtgatgtggttcctcatccccgggttgttcttccgttacactatagtcgattgtctttccattaacccgtggtggcgttcccgtcttaaaacgctcaagatcaaagccaagttcttcaaggttttccgaaagttttaccgctgacttagagttatttggaccagattcatactgtaattcaccaataatgatctttccgcgcgctgcagttccaacagttagtacaaccgtcttagcgtggtaacgagctcctgtattagtaataacacctttgcagacaccatcttcaacaattaactggtcaacagttgcttgacggagagtaaggttaggttcttcctcaattgtctgcttcattgcacggtgataagcatgtttatctgcttgagctcgtaatgcacggacagcgggacccttaccggtatttaacatccgcatttgaacataggtcttatcaatgttatggcccatttcaccaccaagagcatcaatttcgcggaccacgattccttttgccggaccaccaacagaggggttacatggcataaaagcaaccatttcaagattaattgttaccaacaaggtcttatttcccatccgggctgcggcaagggcggcctcgcttccggcatgacccgccccgacaataattacatcgtatgatcccgcttcgtattgaacggcatcagatgtttgcaatgcttctgaactcttcattcttctattccctactttcctaaacagaattgactaaataactggtcaagcaactcatcttggtaactatccccagtaatttcacctaataattcccaacaccgggtcatatcaatttgaaccaggtctaccggcattccatcattaattccttttaagacatcgcttaaagcatcattagcttggtgaagtaagccaatgtgccgagcatttgtaaccattacattattctggttgctttcaatccccttgttgaagaacatgtgaccaatctgttcaccaagttgatccattccttcatgattaacgattgaagtttcaataacagcactcttaccagctagtgatttcaattcctctaaatcaaccttgcgtggaagatccgtcttatttaagatgatgatccgctgcttatccttggttgcttcaagtaattggcgatcctcgtcagttaattcatttgaactatcaatcaagagaagtactaagtcagcggcgcccaaagctttgcgactccgctctaccccgatcttttcaacttggtcatttgtatcgcggattcctgctgtatcaattaacttcaatggcaccccgttgacattgacatattcttcaattacgtcccgggttgtcccagcaacgtttgtaacgatcgccttgtcttcgtgaagcaaggaattcaataagcttgatttaccaacatttggctgcccgatgatagccgttgctaaaccatctcgcaaaatctttccttgcttagctgttttaagaaggccttggattcgttgttgaatgtcctctgctttttcttttaagagtttcgtcgtcatttcttcaacagcatcatattctggataatcaatattaacctctacctgtgccaatacatccaaaatgtcttgtcgcaaattacgaattaaccgcgacaaatcaccatcaagttggtttaatgcaaccttcatcgatttatctgtctttgcacgaattagatccattactgcttctgattgggataaatcgagacgaccatttaagaaggctcgtttagtaaattcacctggttctgccatccgggcgccaaagctcagtaccaattgcagaatacggttagttgctaacaatcccccgtgacagttaatttcaatcacgtcttcacgcgtataagtgtgaggcgcgcgcattactgaaaccatcacttcatcaacttcctggtccgtatcagggtcaacaatatgaccatagttaatggtatgagttgctactttggcgagatcttttcctttgtagatccgttgagcaactttcaccgcatcatccccactaattcggataatggaaattccaccttcaccaaccggtgtcgaaattgctgcaatcgtatcattctcgctatttgccatcgctactttactcctttctaacaaaaaaagtgctagtccatgcatagtaataaaaatatcactaacatggtcaaagcactttcactactttaacgaatattaaatttataaccgctcatattctaagatcattaccagaaattgtcaacaaataagttagtccttaggcgcaatcacgatactccggtaaggttcccgaccgtgggagtatgtttttacgtggtgattattctcaagttcatggtgaatttgtttccgttcgcgggcgggcatcgggtccataaaaactgctttcccacttgcaactacttccatcgccgccttttgcgctaggttgtgaactgcttcttgacgccgttcacgataattggaagtatcaagttcaacatttacttttgccgctccatgataatccatgaatatattactaagctgttccatcgagttgatccggcgaccgtgcttaccgatcacccgtccattttcctcagtttggagattaattttgagatcatgagcttctaaattaataatccgcggttcaacagcaatacctaattccttaaatactgtcgttagatattcaaccaattctttactagttgcttgaacctttttaagattggcctgttgccgccgcttgatttcagtagggtcgagctcatcttcagctaaatttaagcttgcaggcttttgttctggctcttttgccagttgctcatctttttcttccagtgagggcatcgcaatttctttatcttttattactgcatccacttgcgcttggcgtcgtccaattcctagaaaaccgtgccgcggctgttgaagaaccctaaattcaattgtctgattaacagttggcttcaattgtgtacgggccttttcttttgcttcttcaattgttgttccagtaaaaactgccatttttatcccccgtgaatttaattaatttccactctttaaatttattactaaataaaaaggctcgcaacaactttacttgtcacagccttaataacttatttccgccgactttggtaagcgcgacgttttgctttttcaatcttgcgacgttttgctttttcagcccgttgcttttcttcacgttcacgacgaatcttaaatggattctggatgataagcgtttggacaacttggaaggcatttgttactacccagtataaggtaatagctgaagagaatcccaatgccatgaagaataccataatcggcataaaccacgtcattgtagttgtcattgagtttttttcgggcattgaagccatggataaccatgaactaataaatgtaaataatgccgctagaataggcataatgtagtatgggtccgggtgacctaactgaagccacaagaaagttccattccgtaaggctgaggtccgccagattgcttgataaagagcccacataactggtagctgaaccagtaacggaagcatcgaagcccatggattaactcctgcttctttatagagcttctgcgtctccatttgcatcttttgcattgactcgcgatcacgtgatgagtattttttctgaattgcctttaattgaggagcaagttcttgcgtcttcatcatggtctttgtttggtagaacatcaatggcagtaagatgatccggatgatgatcgtaaagataatgatccccattccatatccgccaaagtgctttgataaccaaatgataaattgtgaacagttatagataatgtagtggtcccagataccagtactatgactagtaattggcttattggagcaagcagctaaaaatagggtcaagctcatgattgctcccaagcttaggaatttttttgttttcttattcaaatcctaatcctcacttttttcatctaacaaatgtgctcgctttaaaacgtgcactaggtttttctttgtttctgccattgataaaccatctgccgctgaccgagcaataaccaagaaatcaacatcagaccgtaattgcggtttcacctctaataatgtttgacgaatacgccgcttaacccaattacgatgcacagcatttccaatcttttttccaacagaaataccgacacgaaaatgtttttgtcctggcttttccatttgatatacgacaaatttgtggttggccacggaattatgggtttcaaaaacccgttgaaactcactttccttttttacgcgatatgattttctcatttgtataatccccagccttaatttaagtagatataaaaatagggccgggcatacgacaactttaacgattcaaattgctcgtcaagctgactgccctgccccacacaataaaaaaagccactataaaagtggccgtggttatgcagataatacttttctgcccttttgacgccgacgtgctaataccttacggccgttactggtgctcatgcgcttacggaagccatggacacgtgcacggtgacgcttctttggttgaaacgtgcgcttcatacaattgcacctcctattaaattcgagtggtttggtttctagagtctaaaagacgatctcttcaaacatactttggtagtataacacacttaccgaaattaataaacggcgaatttttatttaaatttttttgattattaacaaaattagcaaaataatccacagcgttgtgtaaattcataatttgtggacaagttatcaacaatgtttttcagagattatccccagattcacacatgttgataaagttatccacaagtggtctttcaggtgttgataactctctattttactgctatatcaatagtatatatcaacacaattctgtggataagtgataatggaatctccttttccccatttttcacagcaatattattaatttacacacagtgttgtgtaaacttttttattattatccacttggttgtggaaaactttcccatgtaatgataaaataccgtttgtaatttaatactttaggaggaaattattttgactgagctcgattctctgtgggaagcgatccaaaattcatttcgtcaggataccactccggttacctttgacactttgattgctccggcaaaagcaatttctctctctcaaaatcaactggaaatcgaggtgcccactccggtgcatcgcgatttttggcgcaaaaatttaaatacacagcttaaagaattcgctcaacatgaattgggacgtaatattgagccgcattatattttagagggagaatttacctatacaaataaaaaaacagaagatgatccaactccttcttttgagatggacactcctcttaatcctcattacaactttggaacattcgttgttggagaaggaaataaaatggcacacgctgcagcatttgccgttgccgaaagtccgggcagcctttacaacccgctctttatttatggaggggttggtttaggaaaaacccacttaatggaagcgatcggtaaccatatgcttcaagttaatccaaattcgcgtgtcaaatatgtgacgagtgaggattttaccaacgattatattaatgctattcgtaataatacgactgaacaattaagagaagaatatcgtaaccttgatctcctattaattgatgatattcaatttttagccaacaaagagggaacacagctagaatttttcaatacttttaatgcccttcatgatcgcaaaaaacaaattgttatgacatctgatcggattccaaatgagattcccgaactgcaagaccggcttgtatcacgtttcagatggggacttactgtcgaaatcactcctcctgacttagagacgagaattgccatcttgcggagtaaagttgaggaagatcatattgatattggaaacgacacccttaattatatcgctggccaaatcgatacaaatattcgtgaactagaaggagccttaacaaaggttcaagcatttgctaatttaagcggtgagcgaatcacgccaagcttagcatctcaagcattaaagggacttcaccgcgtagccaaaaacgaaatatcaatcgctacaattcaaaaacaagtcgctgatttttataatataactcaaggagatatccttggtaaaaagcgagttaaacaaattgttatgcctcgccaaatcgctatgtatctttctcgagaactcaccgattcctcgttgccaaaaatcggcaacgaattcggcggcaaagaccataccaccgttttacatgctatcgacaaaatcgaggcagaactaaaaaaggatactgacttacaaaacgatattacaaaattaaaagctaaactacgatcataagctgtggataagtataataattatcctcaaacttatccacaagttatcaacaggtggataactcgcaataaagatgtttaaatagttttccacagtattaacaggccctactactacgactatattttaaactattaaatatatttatatacttatacaaaaggactgaaacatatgaattttacaattaaccgatctgcattcattagtcaactaaataatgtcttacgtgccatttcatctaaaaccacaattccaattcttactggattaaagatggtcgtaaacgaagacaacattgtgttaactggtagcaattctgacatcactattgaaagtgttattaatgctaatgatgctgagaacgatttaacaattgaagccactggcgctattgtattaccagcccgcttcttcagtgatattgttaaaaagctgccagacaaaaaagtaactattgaagttacaagtggttttcaagcagatattacttccggttcagctaagtttcaaattaatggccaagatgctgaaaactttcctcatttaccagaaattgaaactaacaaatcagtaacccttcctaacgacatccttaaagaagtaattcgtcaaactgttattgcggtatctaagcaagaaagtcgcccaatccttgccggggtgcatatgacgttaaaagatggcgtcctaacagctgttgcaacagatagtcatcgacttgcacaacggaaagtggtcctcgaaaacatcgataacagcatagattttgatgtgattattcctggaaagagcatggaagaactttctggaatgattagcgatgtccatgaagatgtacaaatgcaagtaaccgaaaatcaagtattgtttatttttggtaatactcatttctattcgcgattactagaagggaactatcctgaaacaagccagttaattccacaaactgctgatacaacagttgaactagaagctgggacatttctatcatcaattgagcgtgcttcgcttttatctcatgaaagccgtaatgatgtggttaagttaagtctaaagccatcagaaagtgttgtccgaattagtggtgattctccagatatcggtaccgttgaagaaaaggtagtcacgtctgctcttgatggtaatgatcttgaaatctcgttcaatcctaactacatgaaagatgctttgcgttcttttggtcaggcaacgatcaagatttcatttacttcaccattgcgaccatttaccttggtgccaacagaagatcaagaaaactttgtccacttaattacaccagtacggacattctaagaaaggtcttatataagttttataaaaaagagactacagaacgttttgttttgtaacctcttttttatttgccatagattaaattttattagtattgctagtttatattcagatttttgaccatagagcaaatttaaccgaattttgataaaaaaggctaaaataagttaatgcgctcagaaaggctaataacgcaaaattaaatcaaataatgtggtataataaaattacaaaagtaggtgaaaaaaatggaagaaaagtcagtgttgattgatagtccatttattacactcggccagttactcaaagaagaggggattattcctactggcggagcagctaaatggtttctaaaagaaaatactgtattagtaaatgatgagccagatgatcggcgaggacgcaaattgtatcccgaagataagattcaaattcctgaccaccaattacttgttattaagggtaagtagggataagcatgattctgacggaattgcatttacatcactttcgaaattatcaggatctaaccgttcacttcaaccctggagtgaacgttttaattggtcataatgcacagggtaaaacgaatatgctagaggcaatctatgttctttccctgaccaagagtcatcgaacaagtaatgaccatgaacttattaattggcaagaaaaatcagctctaataagtggcacagtagagaaaagtattggcaagattccacttgaattacaattctcaagtaaaggaaaaaaggcaaaggtaaatcatttagaacaagcgcgattatcacagtatgttggtcaactaaatgcaatattatttgctcctgaggacttgtcgttggtaaaagggtccccagctttacggcgccactttatggatcgagaatttagccagatgagtagcaagtacctctacaatgcaggccaataccgcacactcttacgacaaaaaaacaaatatttaaagcaactaaaatataagcaacaaactgatcgcgtccttttaggagtcctatctgatcagcttgctgcttttggtgcggaagtaattattgcccgtcaacattttttaaagcaccttgaaggatgggcagctgatttacatcaagagatttcactgaataaggaatcattacagcttgaatacgttaatcaattaaaggttaatgatgagactactgctgaagaggcttatcaggccctttttaaattatatcaagactacgaacagcgtgaaattgagcaggggacaacaatttacggcccccatcgtgatgatatccgctttctggtaaatgataaaaatgtacaggcttttggatcgcaaggacaacagcgaacgacagcactatcagtaaagctagcagagattgatttgatgaaagagcaaacaggcgagtatccattattattattggacgatgtgttatcggaactagatacaattcgacaaacacacctgttaacagccattcagaataaagttcaaacatttttgacgacaactagtttgagtgatgttgctcgccagctaattaatgaacccacgatttttgaaattgagcacggcactttgaataaggaggaagtaaagtgagcaacgaacaacaaaaagaaaccaagatggaattggctagcgaatacgatgctagtcaaattcaggttttaaagggattggatgcagttcgaaagcgtcccggaatgtacattggttccacttcagcccagggacttcatcaccttgtttgggaaattgtcgataacggaattgatgaagccttagcaggattctgtgatgaaattaatgttgtagttaatccagataacagtattactgttaaggataatggtcgtggaattccaattgatacgcaaaaagaaactggaaagtcagccttagaaacggtctttactgttctgcacgccggaggaaaatttggcggcggcggatataaggtttctggaggtcttcacggggtaggggcttctgttgtaaatgccttatctactgaattagatgttaaagttgctcgtcaaggtaaacgttactacatggattttgatcatggtcatgttaagtctgcaatgaaggtaattgaagaaggacttccagaaactgagcatggtacaaccgttcactttaagccggatccagaaattttccgtgaaacaacgacttacaatattaaaactttaactgatcgtttaagagagttagctttcttaaataagggacttaaaatcacgatcgaagacttacgagaaacagatcatgaacggaaagaattccattatgaaggtggtattcgtcattatgttgaataccttaatgaagatcaaaatgttttatttgatccaccaatttacgtggaaggtaaagaaaatgatattactgttgaagtttccttacaatatacagattcatatcgtagcaacttactaacttttactaacaatattcatacttatgaaggtggaactcatgagaccggatttaagatggctcttacacgcgttattaatgactacggccacaaagcaggtgttttaaagtcgaatgagaccttatcaggagatgacgtacgggaaggtttaactgctgttgtctccattaagcaccctgatccgcaattcgagggacagactaagactaagttaggaaattcagatgcacgaacagcgactgaccatgtctttgcggcaacatttaaccgattcttattagaacacccagacgaagcgcggcaaattattgaaaaaggtcaactcgcttccaaagcaagagtggctgctaaacgggcacgggaagttactcgtaaaaagagtggtcttgaaattagcaatttgccaggtaagttagctgataacaccagtaaggatcctgaaatttcagaattatttattgtcgaaggggattctgccggtggatcagcaaagcagggacgttctcgactcacccaggcaatccttccaattcgaggaaagatcttgaatgttgaaaaagcaacccttgatcgagttctagctaatgacgaaattcgttctctatttaccgctcttggaacaggttttggggatgactttgatattacaaaggctaattaccataaattgattatcatgactgatgcggatgtcgatggtgcccacattcggacattactgttaaccttgttctaccgctttatgaaaccaatgattacgcatgggtatgtttatattgcccaaccgccgctatatcaagttcggcaaggtaaatttgtaaaatacattgactctgatgaagaactagagcaggttgtaagctcactgcagccaagtcctaagccagttattcagcgttacaaagggctaggtgaaatggatgctgagcaattatgggaaacaacaatggacccagaaaatcggcacctattacgagtaaaactagacgacgcagaacaggctgataagattttcccaatgctaatgggaaccaaggtcggaccacggcgcgactttattgagcaaaatgctaagttcgttgaaaaccttgacctgtaattaactgttgtttactgctaacgcaaaaaaggaggaacgacattggctgaacaagatatgcctaatcggatcacggatgtaaatcttacgagtcagatgaaaaactcattcttggattatgcaatgagtgttattgtttcacgtgcgcttccagacgtccgtgatggattaaaaccggtacaacgccggattctatatggaatgaatgaattaggggttactcccgataagccttacaagaagtcagcccggattgtcggggatgtaatgggtaagttccacccacatggtgactcttcaatttatgaaggacttgtgcggatggctcaagactttagttatcgttacatgcttgttgatggtcacggtaacttcgggtcagttgatggtgatggagcggccgccatgcgttatactgaagcaaagatgagcaaaattgcagttgaaatgcttcgggatatcaataaaaataccgttgatttccatgataactatgatggtactgaaaaagaaccggatgtattaccagctcgttttcctaatttattagttaacggtgcctcagggattgccgtggggatggctactaatattccaacccataatttaggtgaggtgattaatggcctgcatatgttaatgaataaccctgatattacaacggaaggactaatgaaggctattcctggtcccgactttccaactggtggagtagtaatgggtaagtccggtattcgtaaagcttatgaaaccggtcggggaactattattgttcgagcaaaagttgatattgaagaacagaagaatggtaagcaacggatcattgttcacgaaattccatacatggttaataaggcaaagttaattgaacgaattgctgaattagctcggaataaagatattgatggaattactgatgttaacgatgaaactgaccgtgacggaatgcgaatcgtaattgatgttcgtcgtgatgccagtgctgaagttatcttgaataatctttacaagatgaccttgatgcaaacaacttttaacttcaatatgctagcaattgttaatggggctccaaagattttaagcttgaaacaaatcttgcaatattatctggaacaccaggaatcagttgtacggcggcgaacggaatttgaattaaagaaagcccagaatcgtgcgcacattgttgccggattgcggattgctttagaccatattgatgagataattaatattattcgtaattcacaaacaagtgaagtagcgaaaaatgagttgatgaataattatggtttatcagatcgacaggctcaagctatcctcgatatgcggttagttcggttgaccggtctagaacgggaaaagatagaggatgaataccaaaaattaatggcagcaattgctgattacaaggatattcttgctcatcgtgaacggatcaatcaaatcatttatgacgaattgatggaaattcaaaaacgttttggagatgaacggcggactgaacttcaagttggtgatattaccaatattgaagatgaagacttaattgaagaagaagatattatcgttgccttgacccacaatggatacattaaacgtcttccagttgatgaatttaagtctcagcatcgtgggggtcgtggtgttaagggaatgggagttcataaagatgattttattgaacaactaatttctagctcaactcatgatatgttgctcttctttactaattcaggaaaagtatactcaatgaaagggtatgaagttcctgaatatggtcgggctgcgcagggaattccaattattaacctgcttggaattaataataaagagaagattagcgctgttatcaatgtttcacatgaaactaacgatgatgataaatacctcttctttactactaagctaggaacagttaaacggacagcagtaacagagtttaagaatattcgaagtaatggattaaaggcgcttaatctccatgaaaacgatgaattgattgatgtagaagttattagtgaagatcagccaatgattattggtactcataatggatatgctcttagctttaaatcatcagttgttcggtcaatgggacgaagcgcggctggagttcgtgggattcgtttacgagatgaagactacgtaattggcgctgcccctcttaattctgatagcaaggtacttgtaattagtgaaaatggttttggaaagcaaactcctgcttctgaatacccaatcaaaggccggggcggattaggagttaagacagttaatgttactgcaaagaatggcccgctggttggtttaacgactgtcaatggtgatgaagatatcatgttagtgactgaccagggagtaattattcgttttggcattgaaagtgtatcgcaaactggacgatctgcggttggtgttcacttaattaagatggataatggtgcccgtgttgctacgattgcaaaggtggataaagaagtcgatgaggagactgaagaagtaactaataattcctcacaagaagaaaatcaaccaacagaaaattaaaaaaataaagtgagaaagtagatattttacgtatatatagttatagtgaccgcaacatttaggatttcttgttagatgttccttgttttaaatagaattttatgctatattttatgtctgtgagtatacgtaatgacgtctactttccttgttcttctcaaatagcgagaagagccagagtccataaggaggtgtaacattcatggaaacacgcaaatatgaaattacttacatcattcgtcctgatatcgaagaatctgcaaagagcgaattggtagaccgattcgacaagatcttggcggacaatggtgcaactatcgctgactcaaaggattggtcaactcgtcgttttgcttacccaatcgctaagtacactgaaggtacttaccacgtggtaaacttaactactgattcagaccaagctttaaacgaatttgatcgtttagctaagttcagtgatgatatcctacgtcacatgattgttaagcttgatgcttaattaatttgtcaataaagtaaagagaggagaaagatctatgcttaatcgtgcagtcttaactgggcgtttaacaagagatcccgagttgcggtacacaaccagcgggacggctgttgtttcatttacgttagctgttgatcggcaattccgaaaccaaaatggtgatcgtgatgctgactttatcaattgcgttatttggcgtaaatccgctgaaaactttagtaactttacgcataagggttcacttgttggaattgaagggcgtattcaaacccggaattatgaaaaccaacagggtaaccgtgtatatgttaccgaagttgttgtagataactttgcattgttagaacctcgtcaaaatggtggtgtgaaccaatcaggcgttcaacagccatttaacaataaccaacaatcgtttggtgctcaggctccacaatatggcagtcaatcacaacctggaaataatgctcctcaaagtaatccgtcaccaagtatggacaatggtttcgatcccaatcaaaatgctggcaaccagttccctggaagtagtgatgatggtggtcaatccattgatttagctgatgacgaattaccattctaaataaatttttactcagaataggagggtaatttcatggcacaacaacgtcggggcggacgtcgtcgtcgtaaggtcgacttcatcgccgcaaaccacatcgaatacatcgattacaaagacactgatttattacgtcggttcatttctgaacgtggtaagatcttaccacgtcgggttactggtaccagtgctaaaaaccaacgtaagttaactatcgctatcaagcgtgcacggatcatgggtcttttgccattcgttgcagaagactagtttccactagtaatattaattaaagagacctttttataggtctctttaatttttaaatgtgcgcccggcatgggtattagctaggcggtgagagtccgctatgggccgtagtagtcggaaccatgagctgaggacaagggtgtccactgcgaggtggaatctgaaggaagtctaaggcaaagtactgcaccgatgaacaagaagtagctataaggctggaactaactggataagactgcatgacaagttaaagtccaacactactcgaagttactttcagtaaagctaccggtgacatggtacgaaagttaatatccttacccggggagatctggcctacacgtttccgacaagaggaataagtttaatttccacagaaacaagcggtgcagtgatgtagcgttgagtaagccagaagtcagccgaggtcatagtagtctgagtaatcagatgaaggactgaacgacaataacttgtaacttatatcggaggtgtaatcaggtgcgacaatcgcagaaaacagaacaacaagctgaccgcttgtcgaggataggtttggaaaaccgaaagtacacaagggcgcgtagtaccgattatggtgaaggtaaaggtatgagtgtcactatccaagacttagtcttggaccgcaataaccttaatcaggcttatttgcgagttaagagaaataaaggggcagcaggcattgacgatatgacagtcaatgaccttctgccatatctcagagaaaataagacggaattgatcgctagtttgcgtgagggcaagtataaaccagcaccagtcaaacgggtagaaattccgaagcctaatggtggagtaagaaaactcggaataccaacagtggtggaccgaatggttcaacaagctgtggcccaaattcttacacctatctttgagcgtgttttctctgataatagttttggcttccgccctcaccgtggggctcacgacgctattgcaaaagtagtagatctttataatcaaggttatcgaagagttgtcgacttagacctaaaagcctattttgataatgttaatcatgacttgatgattaagtatcttcaacaatatattgatgacccatggacactaaggctcattcgtaagtttctaactagcggagtcttagaccatgggcttttcgctaagagtgaaaaaggaaccccacaaggagggccattgtcaccaatactggcgaatatctatctaaatgagttggataaagagttgactagacgtggtcaccactttgtgcgctatgcggatgattgtaacatttatgttaaaagtcaacgagccggagaacgagtaatgcgaagcattacccagtttcttgaaaagcgattgaaagttaaagtgaacccagataaaaccaaagtcggtagcccgctacggttaaagtttcttggcttttcgttgggtgtagaccacaatggagcctacgcccgtccagcaaaacaatcgcaacaacgagtaaagaaagcattgaggttattaactaaacgtaatcgtggaatatccctgacaagaatgtttgaagaaattcatcgaaaaatgcgtggatggcttcagtactactcaattgggaaactaactgactttattcaacgccttgacaagtggttgagggcccgaataagacagtatatctggaagcaatggaagaagcttaaaactaaggtaactaacttacagaagctggggctgtcccagcgtgatgcatatgtcttcgctagtacccgcaagggctactggcgaactgcacacagtaagaccttgagctattctctaactaatagaaaactggaacaactcggacttatgaatatgtccaagacgctccagtcaattcaatgtgattaagttgtcgaaccgccgtatacggaaccgtacgtacggtggtgtgagaggtcgataattgaactaatcaattatctcctactcgattatagaaaaggagtgactctaagatgaaactaaataaatatattgatcatactttactaagtcccgaagcaacagaagcacaagtagaaaaagttattaagcaagcaattgataatcattttcatactgttatgattaatccatactgggttgctaaaactcataaagcattagaagaaactgatgtagtaacagcaactgttattggttttcctcttggagccactacaactgcaacaaaagtttttgaaactgagtaagcgattaaagatggtgttgatgaagtcgatatggttatgaatatcggcgaaatgaaaggcaaaaattatgctaaagtagctgatgatattaagacagttgttaaagttgctcataatgccaataaggttgcaaaggtaattattgaaacagctttgctaactgatgatgaaatcactaaggcatctaagattgttgctgatgcaggtgctgactttgtaaaaacatcaacaggtttctcaacccgtggagcagcagttcatgatgctgaattaatgtcagcagctactaaagaaactcccactgaagtaaaggcttctggtggtattcatacaaccgaagaagcagaagcaatgattaatgctggagctacaaagttgggcgttagccatagtatgcaagttattggtaaagaatagaataatgtcgaaaatagttcagcggttggtgaaaatcagcctctgaactattttaatgttattatagattaataataaaacataaatgagggattgcgagtggatagtaagcaacaaattaaacaggccgtccaggttagtaaactttactatttagatggcgttacccaagcagaaatcggaaaaaaactaaatttatcgcgaccaacaatttctcgattacttcaatttgcacgcgagaaaaatattgttaaaatttcaataaatgatccccttagcaatattgaagatctgcagcaccaattaaaagaaaagtatcaactaaaggatgtcattattagtactccagaaagcaatgaaacggctgaaattttatcatctttaggtaaggccacggctcgttaccttgataaaaaagttaaggataatgatgttattggtgttagttggggaaggacactggtcagcgtagcacgtcaattgataccaaatgaccgtaaaaatgttcaggtggtctatttgaaaggaacagtggcgaactctactcataataattatgttgtagaggttactaaatgttttaataaatgctaccatacccaggcgcagattcttccgcttcctttaatttttgaaaataagcaaattaaagagatggtgataaaagataaatttattaacgagattttagatactggtaagcggacaagcgtggcactttttacggtagaaacgacggaacaagatgcaacgctatttgaactaggttattttaatgatcagcaaattaaaaccttgcaagagaaagcagccggggaccttgtttctcgctttattgatgaacgcgggaaaatcgttgatgaccagttaaatgatcgcacagttgctattgctttagatgatctaaaacaagctcgggaatcagttcttatcgctggtggaatgaataagttaaaagcaatcaaagcggccttagctggaaaatatgcaaatgtattagtaaccgattcacttgtggctcaacacctattatagttacccattagatgatataatctattgactaagtatttgatgtgatatgatagatttatccaattaataatttaaagctatttttaggaggactagcatgcgaaaaattttcagtcgtgagaactgggagttttattttgaacacccagccgtccgctggaatgtctgctatatagtgcttttaacaatcattgggcttattttagggtttatggataactggattattggactaattgttttagtaatcgcagttattggtggagctattagtattcggcggttaagaaaattattagtcgatgctcatgaatatttaaatgaattaacgtataaagtccaacgtgggcaacaagaagcattactggaaatgcccatgggaatgattatgttaaataagcgtcatgaggttgaatggattaatccatatatggcgcggtattttaatcttgaaattgttgtagggaagccgattgcagatgttgatgtaaaattagcggaattaataaaagatcatgcagatgataagcaaacacaagtagtgacatggcgtgaccatcaatttgaatttttggttcagcatcacggacaggtagtttatttattagatattacaaaatatgaacagattagtgcacaatataaggatgaacaaatcttcattggtaatatttacctagataactatgatgagctgattcaaggaatgagtgattctgatgtctctaatcttcataattacgtaacttcacaaataagcgattgggcagttgctaatcacttattgatgaagatcattgatgatgataactacttgattattggacatcaagcttcattaaaagaacttgaaaaacaaaaattcaagattcttgatgttatccgtgaaaatacatccaagcaaaattcgccagttactcttagcgtaggaattgcttatggcgaaaatgatctgataaaacttgctgatacagcacaaaataaccttgacctcgcgttaggtcgtggtggagaccaagttgttgttcgggctcaagatcaggaggcacgtttctatggtggaaagaccaacccgatggagaaacgaacccgggtacgagcacggatgattagtcaagcattacaagaattaatggctcaatcagaccaattatttgtgatgggccacaccaatccagatatggattcaatcggtgcctgtttggggattcgacggattgcggaaatgaacggtaaagaatgttggattgtgattgatgatgaacatccacactctgatattcaacgtttgatgcatgagattgataattaccagacgattaaggaccatattatttcaccagtcgaagcgttagaaaaagcgacaaataacagtttgttagtaatggttgaccatgctaagcggggaattaccattgctcctgaattatatgataaaatgcaaaacagacttgttatcattgaccaccaccgtcgcggcgaggactttcctgaaaatccattgcttgtttatatcgaaccatatgcttcatcaacttgtgagttaattacggaaatgtttgagtaccaaccacgtgaaggaaaaggacttaacaagcttgaagcaacggcaatgctaacagggattcaggttgatacaaaatcattcaccaagagtgctggtacgcgaacttttgatgcagctagttacttgcgttctgctggtgccgatggtttaatgattcaatcatttatgaaagaaaatccagaaaccttcatgatgcgtaatcatttgatttcaagagcggaaataaatgataaaatagcattatgtacgggtgaagagggacaggtttatgatcctgtcacggctgcccaggctgctgatatgttgctccaaatgagtgggattgaagcttcatttgtaatttttgaacgtgctgataacaagatcggaatttcagcacgctcaatgggaaatgtcaacgtccaggtaatcatggaaaaaatgggtggtggcggtcaccttgcaaatgctgctacacaaatcagtgataaagatattacacaggtcaagcaagagttagttgatattctaactaaacctgataaagagcaagacgatacagaggagtgatcataatgaaagttatttttacacaagatgtacgaggccgtggtcaacgtggtcaaattaaggaagttccagatggctatgctcaaaactacttaattaagcgtggattggcaaaacaagctactaaagcggcgatgagccaactaaagggtcaacagcgtgctgaagaaaaacatgctgctgaagaattagctgatgccaagcggatgaagaagattcttgaagatgataatacagttgttgaattaagcggaaaagccggtacagatggccggatgtttggttcaatttcaacaaaacaaattgcaactgctttacaaaaacaatttgaccttaaaattgataagcgaaagattgagctggcggctccaattaaggcgcttggctacgtaaatgtgccaatcaaacttcatccagaagtcgaagctcaaattcgtgttcacattgctgaaaagtaatgaggattaatagatttaaggagcggtatcgtcatggataatgcaccagtgcaagaagagccacgcgatattgaagcagaaaaagcagttcttggagctgcttttttaagtaaaaacgcgttggctgatgcgatggaatatcttgagccgcaagatttttatcggaaggctcaccaaattatttttgaaaagatggtccaactaaatgatgcggaccagccaatcgatccgttaacgatgaaaaatgtccttgatcaggataatcaaacggaaaatattggtggcgttgcttatattgctgaacttgcaacagcggttccgacggctgctaatgttgtctattactcaaagattgttcatgataaggcgatttcacgacggttgatcaatactgcaaccaagattatcaatgatagctatgccggaaatgataaaattgaagatcaacttgaccgggctgagcaagaaattatgtcagtttcggaaaatagtcgtcaaactggttttaaaagtattagtgacgttttacaagagtcaattaatcatgtcagtgagctctctagtcaagattcagagattactggactttcaactggatatgctcaattagatgagatgacgactggcctgcataaagatgagttggtgattattgcggcacgacctgctgttgggaagactgcctttgttttgaatattgctcaaaacgttgcaactagaaccgataatacggtcgcaattttcagtcttgaaatgggtgcggagtctttagcaaaccggatgctttgtgctgaaggaaatattaacgctaaccacttacggaccggacagcttacgcaggatgaatggcaaagtttatttattgcaactggtgccttgagtaacgctagtatctatattgacgatacaccaggaatcaaggtagcagaaattcgggcacgttgtcggcgcttagcaaaggaaaaaggcaacttaggattgatcgtaattgattaccttcagttgattgaagggagtaatcctgataaccggcaacaagaagtttcagaaatttctcgacaactaaagaaactggcaaaggaattagaagttccagttattgccctatcacagttgtcgcggggagttgaacagcgacaagacaagcgcccggttttatctgatattcgtgaatctggatcgattgaacaggatgcagatattgttagtttcctttatcgtgatgactattatgagcacgatgaagattcggaagataataataacccgggaaataatcaggatgacgatggatcaaatgctagtgaagttgaagtcatcattgaaaagaatcgtagtggtccgcgggggacagttaaattattatttgcaaagtcttataataagttcacttcgatttcctatatccctgaagataataattaaaaactaaatttctaagagggcatttcagtaaaaactgaggtagcccttttagtgcgcttaagacattaaaaatgttttaaaaaaaataaacggtatgatagtaattgaggaggcgtaaacaatgaaccgtcaaggcgtagaattaaaatggcttttattcggaatgtttcttggaagtattgggaatagttttgtctggccattaacaacaatttatattcacgatcagttgcatgagtcattaactgtatcgggaatcgttttactcttttattcgggagcaaatgttgtcggaagttatattagcggaatgctatttgaccgagctaacccgcggaaattaatgattggcgggacactgctagcgacaatcgtaatggctattatgattttcttcaatggctggccgatatatggaattcttttaacagttattggattctttaatggctggatcattacaatggttaattcttttgcgactcgttcaggtcgagatggtcgttatgtttttaatatgttgtattttgccaataacttgggaatggtgattggaactactattgtcggcccgctttatcagtatgcagatggcaatgtttcaccaatgtttttgattaccacaatcctttatacaatgttctcacttgttgttatctttttctttaaggatagtcaacaaacagttgcaaagaccgaagatatggaagctgaagaagagaacaagacagttaatattaagatacctcaagctaacttatggattaactggatcttcttcattgccttagttgtaatctggacaatgtatgaacaatgggcaagtaacctatcagttttcatgactgatcaaggaatctcgatgacaaaatatagtcttttgtggacattaaatgggattttaattgttgttttccaattaggaattacttggcttaatcgctgggttaatcggccatatgcgcaagtatttattgggatgtttacaattggtttctcatttgtcttattactttacgctcactcatatagctggtttgttgcggcaatggtcgttctgacaatcggtgaagccactgctctgccaacaatgcctgccattgtaaacagcctttcaccggttgctgttaagggaaagtatcagggaattctgaacgcattttcttctttaggaaaggcaattggtccgctatttggtggattgatgattgaagcgacctcttatcatatcctctttattatttgtgcgatttcaatttttgtaatggaaataatagtagtctttgttattaagataaaacgtgcaaaagcagttgaatattaaagaagtgattagatgttttataataattttgataatgtccatggtgaagaccgttatggaatggtaggaaaaacaggagatccttttagggaagaatgtaaactagggatttcttgttatcagtgccatgaacagccgttagtaattgcggaaagaaattggatggatacgaataatgatgactcgcaacggtatcaaattgtggtagtttgtgagcattgtggtgctgttgatgaatttattgttaatgatggtcgagaacaccaaattggtaaattaaaacatagtaaataccagccaacagaaaagaatattataaataatggagctgtgaactagaattgttcatggttctttttttaaatccgtttttattaaccaaaacttgagagatttgctatgatggtagttaaaatcaaattaaaagcaatgaggtgaatgttgatgaaaaccaagaaatatcgttacacaggaaaagactttgatattaagacggcaccaactaaggtaaaagattctgctgatgatcttaagaagattaaaaagaagatcaagaaaaatgtaaagtcaatcaagaatgcgcaaaagatgatgtatgcgcggcgtcattatggtgttttagtagtatttcaagcaatggacgcggcaggaaaagatagtatgatttcgcatatttttgcgggcgtaaatccagttgggtttaaggtggccaattttaaacaaccaacaggccgcgaattacgtcatgattatctctggagaatcaatcgtgaattgccaatgcgtggtgatattggtgttttcaatcgatcttattatgaggacgttcttgtttcacgcgttcaccctgctttaattttgcaatctaatattccagggattgagtctgttcatgatgttaataataaattctttgatagtcgttatgaagatattcgtcagtacgaaagttatctaacgcggaacggttacttaattgtaaaattcttcctccatgtatcaaaggaagaacagaagaagcgtttcttagcacggattgatacaccagaaaagaattggaagttttctgcagctgatattcgcgaacgtcaatattgggacgattaccaaaaggcatatgaaaaggcgattaatgctaccgccacaaaggaaaatccatggtatgttattccggctgatgataagtggtattcgcgtttaattgtatctgatattttgacaaagaagattaatagtttgccattagcttatcccgaggtttcgccagaacaagaaatgagtttactccaagcacgaaaagaactaatagcagaagataagtaaataaaaaggacgtccgaatgacgtcctttttatttacttggtttaaagatgtacttgtgagtaaagaagtagattgctaatgtagaacaaagtattagaatgttaaagtttttgtcgggtaaggccaaattctttgcgttgaactgttcaccaaattattaatttactcatcgttattagttaaattagattattcattcaaaaaagcagttttcaaatatatgtttaagtttataaatgcccaaaaattgatttttagtatttatatattaacttctaatgataataacccctgaaaatctattttcaagggttattatgttagtattttagtataataacaccaaaaaatagctttttagctttaaggagggaagataaataatgaaatacataccattatctaaatataagtattttattgaagataagacgaatgacccggcagcaattgaaagtgaatatcagagtcgactgaacggatatacaagccagaagacaactctgtttcctcttcttaactatcgcgatggtgcacagacaagtaaatatccaattttctatcttccattaccggaaattcaaaacctggcggatcagcttaggcgtaattctaatatgattaaggatatctctgtaacgcttccccaagttgcgattaatcaatttttgaattcattattactctctgaaattttctacactaatgatattgaaggtgtaaaaacgagtcgtgttgaaattagtactgttattcaggaaaataaccacccaataaatggtgatgatcatatatcaaagaaaaggcttggttcaactataaaaatgtaccagcgcacacaatcaggaaaaaaagttgaaatcaatgttcttcaagactatagaaaaatctatgattccttgttaaaaggcgaacttaatgaagatcgactgcccaatggaaaaatatttcgtgataagcttcctaatagcgaagtgctttcgatcggggatggcattaaaacagttcatcgaccaccaaccacggaaactgcaatcaaggttgcccttacagctttaattgaatatatgaataatgatgatactccttcaatatataaagcccttgtaactcactttttctttgaaaatacccatccatttcttgatggtaacggtcgaatggggcgttatcttttatcgtcatatattactaacaaatttgatcgctttactggcttttctgtggctactgcaattcataataatgttcagcaatactataaggtatttaaggatgccgatagtgcggaaaatagagctgatttaacattttttattcaaaaattattaatgatacttgttagtcagcaggaaaaagtaattaagattttgagtcaatctcgtgaaaagcttgataaagccaatgaaattattagtcagtgggtcaatgaacaccatcatcaattagctgcaacgtctgatagtttgtattgtaatgttctatatcttcttgcacaatcaaagctatttactaaccagttagatttaggaattaaagataatgatattattgaaactttgaagaagagtaatcgccgttatccaatgacaaagactaaggcagccattgaagaactagaagcacttggcgcaattgaaattgtttctaagcgtcctaaacaacatgtaattacaattttataataaaaaaaaagaccaccgattactcggtgatcttttttatatgatgggcagtcaggggatcgaaccctggacccacggattaagagtccgttgctctgccagctgagctaactgcccatgtctttgacaacataaataataatatcaacttccgatcattttcgcaagtgtttttctgaatttatttaataaattttcaaatccatattttaattaggtgtctaactgttataattaacaataaaattaaaattgggagtaattttatgacattaaataaggataaatttgagcaaatgaaccgtttattgcggaactatatgattaacatgaagcatttttatactgaacttgcccctgaattagatataactccacagcaagcacatacgcttttttatatagaaaaacacgctgggcttattcaacgagaattaggtgaccatttccatttacggaatgctagtgttactagtatggtgaaaaatcttgaacgcgacgggtatattatccggaaggcggatcaagagtcagcacgaattaagcgtatttttcttaccaaaaagggtgaagaaaagactaatgaggttaaagaaatatttgataaagcttatttgcagattattagccgcctcgatgaaagagatattgatgcaatagttaaagggatgactaatattaataacaatctaaaaaaataagttaggctcttgacagttaggtatctatgtgtttaaatattcatcatcattaaaagttagatatttaactgttaggaggcttatgctttgagcagaaataaatttagttttcgaagtttctttagtttaataaatcaattacatccgcagtatattaagctttttgtgggaatcttactaggttttatctccacgggtgctaacctatttgttcctcaactagcgcaaaagttaattaataattttaagagtattagtctaacgttggcaattttaacagttgtaatttttatagcaggattaattacaagtgcgttatcagggttattattaggaatttttggtgaaaatattgtttctaaattacggaaacaattatggcaaaaactacttaaaatgcctgtaaaatattttgatgatgttaaaacaggcgaaatcagttcacgattagttaatgatacgtcacaggtgaaggatttgcttgcctcaacattaccaaatgcaatgacatcgcttttacaattcgttggtgcactggttattatgttagcaatggattggcggatgacattgttgatgtttgtggcagttcctttagtgattttagtcatgctaccagtgatgaatcagtcgcgtaagattggtcgggttcggcaagatgaattagcaaaatttgctagtgattccaccgatgtattgggtgaggtccgattagttaagtcttcaaacggtgaagaacatgaactggcaaagggaaatcgtcgtatcgacaatttatatcatgtcggaagaaaagaagcgttgattaactcagtaacgcaaccaattacaaacatgctcatgatgataatgtttcttgggattcttggttacggagcaattcgcgttatgaatggtgcaatgacaatgggcgccttagtttcatttttaatgtatcttttccaaattattagtcctgttgttgtaattagtcagctctttaataatatggcaaagactagcggagccacggaacgtatccaacaaatcttaactgaaccagaagaatttgttgctgataaagatgaaaaagatattgtgagcgcaccgttgaaatttgagaatgttgattttgcatatgaggaaggcaagccagtcttacgagatgttagttttgaaacccaacccaatgcagtggtagcttttgccggtccatctggtggaggaaagtcaactattttctcattaattgaacgattctatcagccaacaggtggaaaaattttgatcggtgaagagaatatcgaaaatgtagacttagccaagtggcgtgaacaaattggtctcgtaagccaagatgctgcggtaatgccaggaactattcgtgataatttaacttatggattacgaagagaagtctcagatgaggaattttgggatgcattgagaatggcttatgcagatggttttgtcagtgaaatggaagatcagttagaaactgaaattggtgaacgagggatcaaactttctgggggacaacggcaacgaatagcgattgcgcgagcttttctccgcgatccaaaaatcttaatgcttgatgaagctactgctagcttggatgctgaatcggaggcaatggttcaaaaagcattgggagacttaatgcaaggaagaacgacactagtaattgcgcatcgcttaagtacgattgtcgatgccgataaaatctactttatcgaaaatggaacagtatccggcgcaggaacccatcaagaattattaaagacaacaccactatatgcacagtatgttaaggatcagtttaaataaaataaagactgcgaaaagataagattttcgcagcctttattttaagtatgaaaaaagcgactgagataaaatctcaatcgctgtaaacctctgatgggcagtcaggggatcgaaccctggacccacggattaagagtccgttgctctgccagctgagctaactgcccatatcctttaacagaatacttaaacagtttaacctgttattgatcaaatgtcaaatatttttcataagtttttagaaaatatttatgaaacttttccctgtgctataatagaggcactgatatatagcagatttaaagtaattaatcaattaacccaatggagggaatcattgatatggcaaagaaaattttagttgttgatgatgaaaaaccaatttctgatatcatcaaatttaatcttgaaaaagaaggatatgaagttgtcgtagcctatgatggcgaagcagctttagaacaagtagaagcagaaaatcctgatttaattattcttgacctaatgctgccgaagatcgatggacttgaagtggccaagcgggttcgggctaagcataccatgccgattattatggtaactgctaaagattcggaactagataaggtgctggggcttgagcttggggccgatgattatgttactaagccgttctctaaccgcgaactagtagcacgagtaaaggctaatttacgacggcaagcaactctgaaggcaccggcagaagaagaaaataataccgatattcaaattggcgaccttacgattcatcctgaagcctataccgtaactaagcgaggcgaaaatatcaatttaacgcatcgtgagtttgaacttttacactatctagctcaacatattggacaagttattaaccgcgaacatcttcttcagactgtatggggttatgactattttggggatgttcggacagttgatgtgaccgttcgacggcttcgtgaaaagattgaagataacccgagtcacccccaatggttaattacccggcgtggtgttggctattacctagcaaatcctgatcagaattagaggctgaaccattgtgagcagcaagttaaaattttatcaatcgattcgttttaaaatcgctctcgtattcgtgttaattttgatgttaacacttgaatgtgttggggcggtttttgtgcgtcaattagagcatcaaaaccttaatacgtttaagcaaaccattgaattaccgtcttacgttgataattctttagcagagcagctatcacgatcaaatactaaaaaagcaaacaaacaaattaaccaaatcctttcagaagttaataataataatatttctgaaatccgggtggttgatagtaagagtattgtgcggggaacaagcaacgctgataatcggagtgcaatcggtcagaaaacaacggaccaagcaatcaaagcaaccttattaaataataggtcgcataccgaaaatttatacgataattcaaatcacacgcgctactatgtcaatgttattccccttgtggataatagtaacaataacgttgtgggagctgtttacctgcgagctagtctagaaagtgtctacgctaatattaataatattactttggtatatctatctgcggcgatgattactattgtcttgagtttgatcttggcaattattatttcccaggaaattacccgcccaattgaagaaatgaggaaacaaacattacgaattgcccggggagactattctggtcaagtaaaagtattgggaaatgacgagttaggacaattagcaggagcagttaataatctttctgtccgggttgaagaggcacaggagtcaagcgattctgaacgacgacggcttgatagcattttatcccatatgtctgatggggttttagccactgatcgtcgagggaatgtgaccattgtaaataatatggcgttacagttactaggtgtcgaaaatgaagatgatttaattggtaagtcaattattgatgtgttggatattcgtcatgactataccgttcggcaactagtaaatggtgaacagcgcgagatgattattgatatgtcaaactctggcaataatttgatcttaaacgcctacttctcaccaattcaacgcgaatctggctttgtcagtgggcttgtctgtgtccttcatgatgtaacgagccagcaaaaagaagaacgcgaacggaagcaattcgtttcaaacgtctcacatgagttgcggactccattaacaagtgttcgaagctatgtcgaagcattaagtgatggtgcttggcaggataaagaaattgcccctaagttcttaaaggttgttcaggatgagacagaccggatgattcggatgatcaatgacctgttgagtctatcacggatggatgcagggacaacgaagctcaatctggaatacgtaaatatcaatgagttatttaactatatcttggatcgtttcgatatgattattaaaaaagaagaagatccaaaaaagaaaaaatataccattgaacgatactttactaagaaagatttatgggttgaaattgataccgataagtttacccaggtaattgataatattatgaataacgcgattaagtattctccagatggtggtgtaattacaacccgcttactggagacgcataatcatgttattttaagtatttctgaccaaggtttagggattccacgaaaagatcttggacgtatctttgatcgcttcttccgcgttgataaggcaagaagccggaagcaagggggaacaggtctgggactagctatttccaaggaagttatcaatatgcttggtggacaaatttgggttgatagtgtagaaggcaagggttcaacattctatatttccttgccatatgtaccttatgaggaggaagactgggatgatgaagaagctgaaaagtaattggcaagcaatcgccttaacggttgttgtgcttcttagtttattcatttcatggattgtctggaccaacccatttccttttgagggagcacgacacgaaaatttcaataataaccaatcacaacaatatacaccgcaatcaaggggcgatgtttatctcccaactaaagcagttgagacaaatgaaaaaggaactcagaatcaactttatagccctaaagctaatttaattctgagcgtaaaaaaagagttagaggattggaaattaggccggacaaatgttgtcaaacaaaataacagtgatgtttatttgagttatttgcgacggcggaactcgttaatgctgacatatccggatgaggtaccgagctcagtcttcaacgaaacattttcccagtcaattgatactgaccgggttaatcagattaaccatattattatcccgctaaacgggcaacatgagatttacttacttggtgaccaccattatagtgtgtaccgagtacgggtagagcagggaaaatttaaccatattcggcaactcttaaagtcaatggatcgaatcccagttgaccataaaactattaacggagtagcagtaatgatgtatccccggtcctttgagttaccagcattaggatatcaaatcactgcgcaaaacattgatacccttagtgctagtctaatgagtactaaccaacacacaacaattacggcaaatcggaatggcaacgagactacctatacggatggaaccaatcgtcggctgatatttaatcaccaagatggaacgcttaaatacgaaaattaccttagtacggacgatcgggaatcaacaagccagattttcccacacttctataataagttgacgacaattggaattccgcttgataatttgcgctatgatgaggtgagtgagcatggtcgtcggttaaactatcgggcttatgttaatagctttccaattttcaatagtgatggttatggagaagtaacgcttgaatctacaagtagcgggaatgaacgcttctggctaagtctttatagtcttcgagtgccattgccaattgatcaccagatggtcaagcttccatcaagtgcagatgtgattaatcaattacatgcaaccaaccggatgcgtgacatcaaggacttacgtgtcgggtatatttggaaaactgataaagatagtcatgttgtaaagttagtgccaacgtatttcattaagtatcgcggccactgggttgaatataccgagttagaaaagtaggagggttaaagaatgaattttaaacgtattcaatggatctttatccttgcctttttgctttttgatatctttgttggaagttcattaatcttagaaactagatttaccgtttctaatggtcagcaaaatcgccagtcaacagtgttaaaagaaatgcgcaatgactcgattagttatggcgagctttctaataagcagcaaaccggatattatattgctggaaagaaatcctctgatagcggagtcctagagcaagaagccgggaaattacgtaatcaaaattttcgtctttcttcaggaacactaactagtgagtttgataagccaattaaaacaactaaaaataatgagattcggcgtgtcgaccgtctattaaaaaataaaaagatggtaagtttaggaaatcattatcgctataacaaggaattatcggacaaaaatacccttgtttatacgcaaatgctagaaggaaagccgctattttcaaatgatgggcaaattcgttttcggataaactctgactgtgagataacaggttatacgcagacttacttgcaagatgttgaaattctccggcaacggtcaaatacgattagtcagcgccgagcaattacctggttgtataaacataatcaaattcctaataactcccgcattaggtggtcggtgctcagttattctaagctccttaacactactactgatgataaagcagtctatgtgccaacgtggactgttgaaatcaaaactaaaaactcaggagcaattcaacaattacaagttaacgcatttaatagtacagttatgaaggaaacaccagatagtgtgaatacgaactcgttaaataataagtaattgaggaggaactttaagtgacagaaacggatccattacgttatagtatacttgcgagcgggagtactggaaatgtaacttatttggaaacgcgcaaccaccggatcttgattgatgctggtttaagtgggaagcggattgaaaatttaatgaagaagattgatcgatcattaaaggatgtcgatgcgatttttgtaacgcatgaacacagtgatcatacgcatggtgttggtgtcttggcacgtcgctatgggatggatgtttatgccaatgaaggaacctggcaagcaatggccaataaagttggtaaaatcccattagcacaaaagcatattattgcaccaaatactgttaaggacttgggagacatggatattgaaagttttgcggtatctcatgatgctgcgcaaccgcaattttaccaagttcaccacaataataagaccttctgtattattacggatactggttatgtttctgatcgagttgagggaaccatccgaaatgcagatgcctacgtaatggaatgcaatcatgatacagaaatgttgcggatgggtccttattcatggccattaaaacagcggatattaggggatgagggtcacctttccaatgaagaaggtgccgatgcattgatgagtgttgttgggcggcgaaccaaagagattttccttggtcaccgtagtcaacataacaacatgcgttcgctcgcccacttaacagttgcaagtttgatggagcagcatgactttggcgtcgatcatgattttaaattgcaagatgctgaaccagaagaaccaagcaagttaatgacgttataataaagagatcacggtttttatcgactttattcaatgatttttcatatttaaattgtaatttgaagatagtaattctttaacttagtggagggtttaattggtgaataggataaaacaagcttttaaagatcgattgtggctaggcgtaattattgtcggcttatttgctggtcttatcggtggtggaatcgccttaggaattaataacctggtacaacatcatgaagaagtaacaagtacacgagttccagctggctctaataagtctggtggtacgaaggttaataagaataaggctgacttaaacggggaagcgtcccaagcttataagtccgttcaaggagccgttgttagtgttattaataaacaaaaagttcagcaatcaagtgggacgctaggaatttttggttatggcagtagtaacggaagcaacagtgattcttctagtgataataaattagaaaccgctagtgaagggtcaggagttatttataagaagagtggaaattcggcttatgttgtaactaataaccacgttgtcaaaggttcaaacgcactccaagtaattttaagcaatggtaaaaaagttaatgctgatttagttggtgctgattctgcaaccgacttagctgtattgaagattaacgctacaaatgttaagacagttgcatcctttggtaactctaattcgattgttcctggtcaggatgtgctagcaattggttcaccaatgggaagtgaatatgctaatacagtaacaaaagggattatttctgccaaagatcggacattaaaagccgggactgatggaactttgacatcggttatccaaacagatgccgctattaactctggtaattcaggtggtccattaattaatatggcgggtcaagttatcggaattaattcaatgaaacttgcttctgatacacaaggctcttcagttgaaggaattggttttgccattccaagtaatgaagttgtgacaattattaaccagttgattaagaatggtaaaataactcgtccatcactcggaattagtatggtggatcttagtaatgttacttctgatcaacagcaatcagtcttaaaactaccaacaagcgtaaacaaaggggtagtgattatggatgtgaatagtggttcagttgctgatactgctggattgaaaaagtatgatgtcattacaaagcttggtgacactcaagttacagatgcgggttcattaaaggcggccttatataaatacaaagttggacaaaacgctaaagtcacttactaccgtgatggtcaacaacacaccgcaactttgcatttaacaaagagtgctgatacaacatcaactgatgactcacaacaagataataattagtgaattgggagcgagacagaagtcacttttgacttcgtttttcgacgcgaagctagcctctgggagcccccgcaagcaacaataggtctccaacgttcggttttgccggacgttggagaccattgttgtactgtgtatgtgcttttaatgaaagtaacttaacttctgtcttgcttcctttcattaaaagcctcttaattaaaaggggtataatattagttatcaatataaaggatggtgggtaaaatgaataatccacggtttaaatacccagatacaaaggcatttgaatttgtagtacatcgtttagaagaacgcggagtaaacttagacgaacttgcgaagattgtgtatgagacgcaaaaaagttttgaacctgacctaacaataaaagaatgtcagaaatttttgattgatacaatgcataaacgtgaattattaaatagtacaatggtagcccttgagctcgatcggttaaccgaagaaggaaaagtcgatgaacccctagcaagtattatcaaaaatgatgctggtgtatttggggtagatgaaaccctagctttacaaattgctaatatttatggaacaattgggacgacaaactttggttactttgaccgggttaagagtgggattattgccaaatttgaccacgataaggttcatgtaaatacatttattgatgatattctcgcggcgattgtggcggctgtttgtggaaagattgcccaccagtacgcttgattaaaataatctcattgacttttaaataatttatcattaaaataaacataattcgtttagaggagtaaagcaaatgagttatcaaactttacaattaaattatagttggcaaagccggtaactcagggatagctgtagtacagatatgacctgggtttattcacagattatatctgtaccggctgctttatcatgtacaaataaggcctgtacggatttcacgcacgggctttttctatttcactggataaatagtgggatttccgaaacgtggagctcctttttattttgaaaggtggagatagggatgaaacgaattatgggctatattattattggaattgttgtgattggtggttattttggacttttaaggcttcatcaacagaccacaaaaccggtggtagggattttaacgatgatgcatcatccggcattagatcagattcaaaagggggtcgttgccggattagcagaagaaggataccaaaacggaaagaatatcaaaattgaataccagaacgcgaatggtgatcaaggaaacttaaatactatggcaaataaattagtgaatgatcatgcgaaagtaatcgttggtattaccaccccagcttgccaagcacttgctaatgcgaccaaggatattccgattgtgatgggcggaattggtgatccggttggtgccggtttagtaaagaatgaaagatatccagaaggaaacgttacaggagttcatgatgtgaatccgagtgaacagcagattgccttagtaaagaaatttataccaaatattaagaccctaggagtaatttacacatcgagcgatacctcttctgaaagtcagtaccaaacgatggtaaaagcagcgcataaattacatgtaaacttaaaaacttatacaattgcgaatgctaatgaacttaatcagacttcacaaacaatgttgagtaaagtagacgcggttattgttcctagtgacaatacaattgctggatcaatgggagtattggtgaaaaatgcagatgtggtcaataaacctgttttcccgagtgctgatacaatggtaaaagatggtggagtagcttcgattagtcttagccaatacgggcaaggaaaagcagctggaaaaatggcagcacgtattttaaaaggtgaaaaaccaggacagatggcagttaataattaccatcatggaaaaccggttcttaatttaaagcaggcacataagttaggaataaaagttccagcagattttcaacaagaagcagaacaacatggaacagtctttaagtaagataatgggaaaattccgaataataagaaaaattaaagaagataacattcgctaggtaacattccgttgtatatttaccacagattgtgttgtaaatcgttagaaatacgttaaaatgataatgtgaaattgcttgtggataagtcagtggataactaacagtaactttaaagtaattttataaatgttggtatatcaataaaaattattgttcaaaacttatccacaagctgaatatgtgtttgtggataagtggaattctttgtcaacgttctgcaacgacgcttactggcgcaagggatagccaagtcgttgctgaacgattgttcctgtagataactgtggataagtaatttttaagaaaacgcttttttaacaaaaaattaaccgaacattcgggaaaagtaaaaaaatcaacgcaggcctgtggacaactttgtggataaactgtggaaggtagtggatatcttgaatataaaaattattggtgtgggtaagttaaaagaaaagtattttaaagcgggaattgctgaatatgctaaacgacttggacgttattgtaaatttgaaattgttgaggttcctgatgaaaaagcacctgaatctttaagccaagcagaaatggatgaagtaatggcaaaggaaggggaacggattcttgataaaatcaaagatcgcgaatatgtatatgctttagcgattaaaggtaaagaacgttcttctgaagagtttgcaaacgaaatcaataaattaacaacttatggtcacagtgatattacttttgtgatcggcggttcattagggttaagtccagcagtattaaaacgggcagatgcccaaatttcgtttggaggttttaccttgcctcatcaattaatgcgtttagttttaagcgaacaaatttatcgagcttttaccatcatcaatggcctcccatatcataaataaagaatttattgagttttggttagattattatttatcgttgttagcgatggtatagtgtaaatatgaagtgtaatggcataagaattaaaggatttgatttaaaataggcatacgaggttaccaagtaattcttttaggggtaatagcaggaatatgcattttagtgatgcaaggaaaagcaagtgcaatgatagtaaatgaagcacggctgacattgcctaatgaaaaaagaattgagtatgatgaatttgaacggtaccagtttcgggcaaaacagttacgaacttggtggcaagtcaagcgaccaaaatataaaattgattggtcattttatcataagaaacggggatactgggattagctcaggtcctcgtttttcttttaacttttcaaaaaagctattaaaatgaagatattaaaaggaggcaatgataatgaaaaaagttgggattatagtcggcagcgttcgtccaaatcggcggagcatgcaagtagcaaactggttaaaagttcaattaaagaaaagtacaaaggttcaatttgacatcatcgacctaaaagaagttaatttaccgatgatggatgaacctaaaattccttatttgggtttatatgttcacgaaaaaacgcgtaaatggagtgagttagtacaaagctatgatggttttgtgttagtttttccgcaatacaattggggctatccagcagttttgaaaaatgcgattgattacttaggaaaagaatggcaaggaaagccggttagtttagtaacattcggtggacatggcggcttgcaagcacaaattgcaatgaaattggtcgtaaccggcttaaagatggcggcgcttcctgttgatttacaaattaacttgatgccggatgattcaactgcgactgctgatcggaagttgaatacttataatacgcaagcagcgttattaatgactgcttttgaaaatgagttaagctagtttgtgattaaagtagcaaattattgtaggacattaatataaaattggttcaatttgtgaatattatgacaaacatcgtgatattgcagcagattaggcaagattattattacaaattgggcgataatgaacaaaaaatcaaaatgtttctattgcaaaaataaaacgcttgcatgataatggaatcgtattcaaatgccatgaggagggtatttttaatgaatagacaatttgatttcttaatgccaagtgtgaacttctttggtcctggtgttattgccaagattggggatcgtgcaaagatgctcaatatgcacaaaccattgattgttactactgaaggtttatccaagattgacaatggtcctgtaaagcaaaccattgcttcattggaaaaggctggcgttgactatgccgtatttactggcgctgaacctaaccctaagatccggaatgttcaagctggtaaaaagatgtaccaagatgaaaactgtgactcaattattactgttggtgggggttctgctcacgactgtggtaagggtatcggtattgttttaactaacggtgatgacatttccaagcttgccggaattgaaacattgaagaatccacttccaccattgatggctgttaacactactgccggaactggttctgaattaactcgtcacgctgttattactaacgaaaagactcatttgaagtttgttgttgtttcatggcgtaacattccattggtatcattcaacgatccaatgttgatgcttgatattccaaaagacattaccgctgctactggttgtgatgcttttgttcaggctattgaaccatacgtttctgttgaccataacccaattactgatagtcaatgtaaagaagctattcaattaattcaaactgctttaccagaagtagttgctaatggtcacaatattgaagcacggactaagatggttgaagctgaaatgcttgccggaatggccttcaataatgccaacttaggctatgttcacgcaatggctcaccaactcggtggtcaatatgatgctcctcatggtgtttgctgtgccttgctcttgaccactgttgaagaatataacttaatcgcatgtccagagcggtttgctgaattggctaaggtaatgggctttgacactactggtcttaccctttacgaagcagcacaaaagtcaattgacggtatgcgtgaaatgtgccggcttgttggtattccatcatcaatcaaggaaattggtgctaagccagaagactttgaaatgatggccaagaatgccctcaaggatggtaatgccttctctaacccacgtaagggtactgttgaagatattgtaaagctttatcaaaaggcttacgatggcatctactaataattaaataaacacaaagaggctggaaatcagctcagtctctttactgttttacgtattaaactgccagccaaccttacggaggtgggactatgaactagccaagctaattctgtcccctctttttttgtctacttttaattcttaatattttgaatttttttcacaaagttacttgcaagcgtattcttttgaaactataataaaaattattctaagagagaataagaggaaaagagaaaatgatatatttacttgctttaattccagcaattggttggggtgcgatgccattaattactggtaaaattggtggttcaccagttaatcaaatgtttggaatcggtgctggagcttcaattgtgggaattattgcatatttgataacaaaaccaaccgtcagtgtaactgctttttggttctcgctagcgatcggttgtttatggacaattggacaggttggtcagttcatctcgtttaaacatatgggagtttcaaatacgatgcccctttcttcagcatttgtgttagttatgacgtcgtttgtcggcatctttttctttgatgaatggcaaggagccagagcattaagtattgggttgacagcgtgtgtagttgtaattattggggctgttttaacctcgatttcggacggaacatcggataaaaaggtttcgactaagtgggtattatttttattagtaacaacaattggttactgtgcttattcgatttttcctaaaatgccacaggttgctcatgaaagtagtcagggtattttcctaccagaagtattaggaattttacttggttcagtaatttatactatttgttcgggtaacgctaaagcatttaagcaaaaagaacaatacttaaatattttaggaggactttcatgggggattggtaactttgcctatgtttttgttggtaaagctcttggagtagtgactgcttcaatttttggtcaaatgaatgttattatttcaacatttggtggtatcctacttttgcatgaaaccaagaccaagcgagaaatgatatatacagtagttggaattatcctaattgtaattggtagtattttaacagtaattgctaattaattattgaagattttaggtaatatcaataaatgagagaggaaacgcgcaaaatcagctttttaaccgattttacgcgtttttttagtcttatattatttcccaggttatattgtgctatttcttatcaagtagatcaaacctaatttgtccaagttgtaatttttcaggttgtttagccccgtggaaaatcagtttaaataatcgattttcaacgccagccttgaaaacaagttgtttatcgccaatattaattgtataggtgtcaccttcacttactacttctgcctgcaagagggctgaccattgtttagcagcctcttctggatcactaacattaaagattgcttgcttaacaaaaaggtcacctgccggatggaatttaattaagccctgtttcttgaggtcttcccggcgttgatcatcgttgttgccccattgaataaagaatggtgcaggtaaatggttaacaagttcatcattgacatagaaaatcttccattgaataagtttaccggcaggatccacgcgctttccatcagtaatatcaccaacattaagccccagaccctctaatcgctggtgagtttcttcaatattgtcagtccgaatggcaattgttgtgatgcgctgaataccagcaacataatcttcaacggcatcatgaattgctgagttattttcatatgggaatgccttagctttttccttattagcgatggttaagagctcaatgtaattaaggccaaaataatctagtgcattttttgttccccaatattcgtgatgtccaccaggggtaaaggctaaacctttagagttgaagtaatcaattgcatcttgaaggttagttacatcaaccattgtatgatcccaatttaacgtttctgtcattttaatcacccttgttctgtttgcctaattcctttgttcgtttaacagcagcaaggacagcattttcaattcccgctgaaaaagtgcttttatctagttcatgctgggcggtgatacccactccgccagcagaattattaatatcaagtaattcggcagggtgtttaccactttgttctacaaatgcagcggctgcgcgtagattctcaagagcaagtttgtttgcttgttggcgaggcattccggcaagcacacctgcgtttgtaaaactaattagaaagttatagatatagtttggtccagccacgccatatccagtaaatacatctagcaaggattcatcaatgtaatcgacttttccaaaactatttagaaagtcttcaatgacagtttgattagctcgattgtttttaacgacgccgctataacccatggcaacatcagtcaaggtattggggatgatccgtgtaattgcaaaaagatcttcctgtgatgaaagttgtgcaactgttacgccggcaataattgaaagcacgtccttttggtagtggtgggcgacaagttctttcatgatctcttgccagttatcttgtggacgcactcccagaataacaagatcagcattctcaacagccgtccaatcaggttgttgacttgcttgaatatgataagtatcagtcaaataattaactcgattgctcgaaatatctgttatcccagttgtttcaggagtaattacttttttcttcagtgcagcccgcagcattgcttccaccatttgaccaccaccaaatgagtaaatcttaagtgtcattgaaacatcatcctttctatatgtacctaacctaatcgtagcgtatttcaaaccgagacgctaatttaaacacttctttcaaaaaaataaattcacaaattggtctacttgaaattaaattaacaaggaagcgtttgctgtataataaaattgttagttataaatataataaaagggcttttgtttgttaaaaaacaaaattttcaatatgaggtaattggattttgatggagtaatattagttgaattggtctatgaaatagttgtaaaatgtaagcgtttatttaaggaggaaccataatggcatatcaaagtatcaatccatttacgaaccaagtagaaaaaacgtttgaaaatacaactgatgaagaattagaacaaacattgactacggcgcatcaattatatttagattggcggaagtataatgaccttgaagaacggaaacgtcaaattttaaagttaggtcaaatattacgtgaacggcgtgttgaatatgcgacagttatgagtaaggaaatgggaaaactaattagcgaagcagaaggcgaagttgatctttgtgcttctttctgtgattattatgcagcccatgcagatgaatttatgcaaccaaaaatcattgcgacaacgagtggccgcgccaaagttttgaagcaatcattaggaattttagttgcggttgaaccttggaatttcccattttatcaaattgcccgggtatttattcccaactttattgcaggaaaccccatgattttgaaggatgcatcgaattgtccagcatcagcccaagcatttgctgatgccgttaaggaagctggtgcgccagctggcagtttaactaatttattcctttcatatgaccaagtaaataaggcgattgctgataagcgggtagccggtgtttgccttactggttctgaacgtggtggtgcaaccgttgctaaagaggctggtgctaatttgaagaagagcactttggaacttggtggtaatgatgcctttattatcttagacgatgcagattgggaccttgtcgaaaaagttgccccggcagcccgcctgtataatgccggacaagtatgtacatcatcaaaacgttttattgtacttgaaaaggattatgatcgtttcttaaagatgatgaaagatgcgttctcgaaagttaaaatgggtgatccgcttgatccattgacaactcttgctccactatcttctaagaaggctaaggagaagcttcaaaaacaagtagatacagctgtagaaaatggagccaaagtttactatggtaataagctggtagatatggaaggacaattctttatgccaacgatcttaactgatattactccagataacccaatatttgatacggaaatgtttgggccagtagcttcagtttataaggttagttccgaagaggaagcaatcgaattggctaataattcaagctatgggttaggaaacactatctttagcaatgattccgaacatgcagagcgagtagcagcaaagatcgaaactggaatgagttggattaatgcaggctgggcttcattaccagaattaccatttggtggtgttaagaattcaggttatggtcgtgaactcagtagttacggaattgatgaatttactaacaaacatctaatttacgaagcacgacaataaaaattaattaaacgacgcaaataaagggatcgcaagtttggattgcggtccctttagtattacctgggaaattattgaattcttttcaatacaatcttgcaatattgtcttacttcttatatacttagttacataagtgattaactacaaaattgctatttggaggaatattcatatgactgcgaaaagaaacagccatcataaatctcgattacgacaattatttgcaacacgtcgacgtcggtggattggcatcggtggcctaattgtaattataatttttgtattagtttcaattcgacatgcaagtgaggaaaaagcaacagaaaaaaatgaatataatattctacgggttactgagcagtcagattttaatctgacaggaaagattgaaccagtccagatgcaaacattaaccttgccatctggtaacctgcaaaatcttaatgtgaaaaacggagatcacgttgcgcaaggagaagcgctcttaaccatgcataatgatagtacacaagatagtgttactgaactgcagggagatcttagtaaaagtcaacgaacgatgaatgtccaacaacagacgattaataatttacgccaacagttgaatgggatggggcaaggtgatgaagggtacaatgacctgcgcaatcagcttaccgaagcgcaaaatgcatatgcagacgcacaagcaagtgttgctgccactcaacaacagcttagcaccgcttcaagcaaggttaatcaaacattaacagcaccttttgctggttatgttacggttgaccaatcaaagcaaaatgctcctgtaattactctttactcagatacgcttcaatttgtcggtcaagtttcggaatatgattatagtaaacttcatcaaagtgctgatctaaaggtgaaggccttagcaacaaaccgaactgctaatactcaggtaagttatctttcaacaattccaactaaaaatagtggaaataataccaaatatgaagtaactgctaatgttagtgctaataaatttatggcggggcaaacagcaaaagcttctattaaacaagatggagttcaaattcccaaatcggcagttcgtcatgggaaggtatttgttgttgattcagacaatcgagttcgcgagacagatgttagtggccgggcagtcaacagctcttatgttgtgacagacggtgttgatgctggtgatcggattgtgactaaccctaacagtaagttgaaaaataatgcaaaggttgattaatatgatcaagctaaagaacattaataaatattaccgtcaaggtagccaacgttttcatgttctccatgatattaatgttgacattgagcaaggagaattagtagcaattatcggtgaatctgggtcaggaaaatcaaccttgattaatattgtaggctttcttgatgatgattttgagggaacatacttctaccaaaatcacccaatccatgattattcgcgaaagcaattttcaaatttacgaaatcaaaatgtcggtttcgtttttcaaaatttcaaactgctacgtggatcaaccgttgcagataatgttggattacccttgctatatgcaggaaaacgacgtcgtgaaattggcgaacgtgtttctgaagtcttagagcaagttggtttagccggatatgaaagtcaatttcctaaaaatatgtctggtggacaacaacaaagagtatctattgcccgggcaatatcaacgaacccgaaatttttaattgctgacgaaccaacgggagcactcgatacagaaacaagtcaagaaattatgaatctttttaagcgattgaatcatgaagaaggaacaacgattattatggttacccatgatccccatgtcgctgaacaatgtgaccgagtaattaaaattattgatggtcgaattgtaagtgacagtaaaggcggtgaatatcatgcagacaattgagttgatcaaatcagctatccagtcattaaaggcgaataaaaagcggagtttcctaacgattatcggaattatgattggtattgctgcagttattgctatccttggaattggggacgggattacgaaaacgatgtatgataagttcggtaataatgctaagcaaggccagcaaacaaccgaaatcgtctataatcctgataatgttaattcgactgtcaatggattcacgcaggaacaagttgctgatattaatactcaatttggtggtgaaattaaaaaggctgagattgagcaggaatcagataatctttcaacacatgcagatattggtgatgcgactaaatcagtgacattaagcttattaaaggaaccaacccatacggtaaaactgattgcgggtcacaactttggtaaacgaacttttgaactaggggaagctaatgtcctaatgagtgaaaaagtagctaaacggcagtatggttcagcacaaaatgcgcttggcacaactgtaacaattaataatgtcacttataaagttacgggagtatataagacacaggcacaattcactgatgatgggaaccaaaactcatacggagttgatttattattaccgaagaaagtttactatcaaggagatagtgctaaagaaggaaatacgcttaaattaacctttagccagggtgtaaatgccagtgctatttcccgcagagtcgcaaagtacttaaaaaataatagttcagcagcgactcaaggaacctatcagtacctagacatggaaaaagcccttaagcaattctcttctcaaatgagtattattactactttcattagttttattgcggcgatttctcttttcattgccggaattggggtaatgaacatgatgtatatttcagtttctgagcggacgcaagaaatcggaattcacttagctgtgggggccacaccatttaacatcatgatgcaattcttagtggaagcagtaattcttaccatgacaggtggattattaggctttttaggcggcgcaggattggcgcacttactagcaccgcttttatcaagtgcgattggtggtggcggcattcatattcacgcccatatttcacttaatgctttcttgttggcatttggaacatcggcagctgttggtttgatttttgggatcttgccggcacgccaagcagctaataagaatttgatcgatatcttgagataagaaaatcctcagttttttgctgaggattttttacgaattctgcagaatgtaaaaaatatcaaattattgagtataataaaaagataaattaaagtgaaatattaggagataggaaaagatgagtaaaaacaggggtaaattaacggttgtttcattactagttgtaattattgtggtatgtgggggatatatgctattacatccatcctcatcaaagaaagttgctagtgaaaaagctactaagaccgagacaatcacaagcagcagttcatctaaagaacataaagcagctacagaagatagttcagataaagttaaggatgatgattctgatgattcgtcttcagtagctgatactaatgatagtgaggcaacttctgcatctgccacagtaagcagtggtaatcaaacagcccaacctgcacaaagtcaaaatacaacccaagcaacggcggtaagtaattctggtcaaactgctagtcctaaagctaccacgaataactataagggaaactgcagtgtcgccaacacaaataaccggtggacaggaagccgaaagacaacccaagctgcatcaactcaacaacctgtaacagtggaagatgggatgaactttagctaccgggctgcgcaaaaagctggcgtgattgataataatacatctgttgaagagttttacaaaaatgccaaggaaggtaatggctctgtaacctacaacggtcaaactatttactacaaagctaagggtaataatcaatatcaagttacaaccgctaaatagtttgattactaaaaaagtgtccggcattttgtccagacacttttttagtaaaaatactatgaaaaatgtaaaatatactaattgtttgcgctttagtatataatgaatatgtttattaagtgatcattcagtatagaaatatacttaaaggtttggatgttattggagtacttttatgcaaaaactatctattaaacaactaataataattacattgtgcttattagtgctggtggttggctgcatgactattcaccagcgtcgtcattttaataagaacgttaagatcgataatgtggcagttggtggattgactgctaagcaagcattaaagaagttacaagataatccacaatcgccaaaaatttatgttaacaatgaattagtatttaaggataagcaatcagtagcaaagtttagtagtgctgacaaacaaaaaattaaaaatgcattacatagtcagtatactttcttcccatcatctaaggcaaagaacattgcgattaagcctcaaaatgttaatcaagatgaagtatcaaagattgatcaagcagtcagtcaaaaggtaacagaactaaataatggtcgaaaagctcctgttgatgcttacgcggtatacgaaaatggccgagtacaagtaaaaccagcagttggtggtactcaatacagtttagatggtttgcataataaagttgaaaatgaaattgctgggggaacagttcatctgaagccaaaatatacgactccactttctgcaaatagtaaaactgttcagaatgaaaaagcaaagctcgaagaattatcaaaacgaactgtaacataccaagtccaaaacaaaaaatatcaattaaattgtggtgagattattaccagagcaacctatcaaaacggaaaataccactttgacactggagcagctgattcaaagattaatgaaattaataatacccaagcaactcttggcaaatcatttgaattcaaaacccatgatggatcagtgatcaaaacaacagatgctggctcatatgggtggaaaatcagtaagaaacaagctggaaagactcttacgaatgcattggttgcaaataagcaaacagtaaacgccaaaaatgatatctatggtaaaggatataatcaacaaggaactgggtataatactacaagcaacaatggtataggggacacatacgccgaagtttcactagccgaccaacatgcctggttttataaagatggtaagtgtgttcttagtactgatattgttagtgggacgaataataaggataatgaaactcctaagggtgtctggtatatcatgtaccagcaaacaccgtctgtccttcgaggccttaacgatgatggttcgaaatatgcaagtaaggtccaatattggtcaccatttactgatagtggatgtggatttcatgatgcaagctggcgtcatgactggtcaaaacaggcttatcttgctaaaggtggtggatcgcatggatgtatcaacatgcatccagatgttgctggtcaagcctttcatgacttacagaaaaatgagcctgtaattatctactaaaggagaatttattatgcgcccaagtgctgaacgctcaataatgattgcggttatttgtttcatattaacaattattatttcattcgccatgtctgagggatggataaagtagggatttaacgatggatttagaaaagaagaaaaatttggtaattattaatctattttatgtaggattaattttgatttactgtattttacatgcaggaccactgaatttaatggtgtttttgggtatgttagtggttgcaaatttaatggggatgttaattaaataatggtttagaaaatgattgatttaactttaccacaagcattcgtttcgggctttttaaatgtttttgaactaattattatttggtggattatagaatgaagttagccacccagttggtggtaaataaaaaacgccattcggcgtgacatcaggtatcatattaagtgaaccaaacctatatgaaaggatgtccgtcaaatgacgcacttaaatgataccatgtctactagtttattgactactcataaaaagaatgctcatcttactaaagaagaacgtgtgatgattgcgactttaaagtcgcaaggactttccaatcgcgcaattggtcgccaattaggagttaatcatcaaacaattaataacgagctcaaccgtggtacggtccgccaacttcgtcgtcaaaaatctaatggtaagatttacgaatattcttactacatctatagttatgaagctggtcaggccacatatcttgaacatcaccgccattctggtcgtcgtcgcttatattattcttcaaagcaatttttacgattagctgatcagctaatgcttggtgagtttgacgaccaccattactccccacaagcggttatttataaggctcgagatttaatgaatgatggcaccctgatcccaaagtcggttgtaactttatatcaatggattaatgagggtgtgcttcgtacgtccaatttagacctctttgaaaagcctaaacgtaagcatcatcgaactcatccgcaagctaaaaggtgcttaggtcctaatattgctcaacgacctcaaactgcggaccaacggtccgaaattggccattgggaactagatacagttcagggacagaaaaacggtaatgacagtgttgtactagtaatgactgatcgcctttcacgagttaatatcacgagtaaaattgctggtaaaactgcgcatgcagtaaatcagttctttataaatttacgccagaaaatgggcacagatgcttactatcgcatctttaagacaataacctctgacaacggttcagaatttagtgagttaacacaagttcacgatcatgttttctatgctgatccgtattccccttgggaacgtggatccaatgagatcaataaccggtttctccgcaaggagattaccaaaggtgaagctataaataactatagtagtgctcagatcatagcgactaatgattggatgaatcactatccacgagctatgtttaatggacattcgtcaatggatatctatcgtaaggccttctaccaagagatatcacagctccatcaaccaataatcaattggtcagtattatttatttgagtccagtggctaacttattcttgaaatttaggctaattattatttatagactagtgacgggttatttgaacaggaaaattattttagttgatttccttgcaagcttagttattatttgcgttcctgttctagaaggttcattagagtttccattaataatgatatatttatggctgtttgataggaaacatgatcgtcagcaaattatatataataaacccgtggtgctagttaattttttcctagaggaaaatgtctaaacatgttggtaaattaacaaaaaaatcttatttttatggtcttaaaattcatgtgatcgttactaagactggctttccgattacttactcaatcacgaatccaggtgtccatgacgtgaaagtgttagagactttatcggaagaagcgaatcttcccaatatcctaggggacaaaggatatattagccataaaatccatgaaaagcttgcccttaagggcattactatatccgttccgccacgtaaaaacatggataaatcagaaaaactagaccatagcttacttggaaaacaaagaaaaattaggttgtcaaaatttcaactcacattctgttaaagggctagagagtagatttgaaagcatattgctggcttacagtgttctattaagtcgagcacaacgacgttttgaaggaactttgagatattctttaggatattaaaattaactagcaccacgggtgatttatagtatactatgtcaaaaggaggagttaggtgaacaatcaaatcacactagcatatttagatcatgatgatctagatgctttacaagttgtaagtgttgtcagtttttatgaatcgtttatcgatggcgcagatccacttgatatgcaagaatatttacagacacaattgacaactgaaatattggcagtagaattggcacagtcaaccagtaaatttattggtattaaggatcatcaaatactcattggttatatgaaagtcaatgatgaaaaagatgctatagagattcaacggctctatctgctcaaagattatcaaaacaaagggttagggcaacggttactcgatgaagcgaatcgttatgctaaaacgaaacaaaaacgttatttacgtttggctgtttatgaaaaaaatcatgcagctattcgtttttatgaacgttatggatttaaaaaaatcgggatcaaacattttcttttaggaaaacaagatcgtatttgtccgattttagaaaaagaaatctaaaaaaacgtcctcacttttgatgctgaggacgttttttagactggtagtggaaccataattcgctttcttttttgataaaacgctaattccgtcacaccttttgctttggtggctaacttcattctataatccaccattttagatattccggatgcaagcgatgtttatgaaaaaaagtatctgtattttttttacagttattgggatctttgctactatcaagattttatttaaaaagtaaatggctgggaagaattttttctcctcagccattttttcaactaatcaacttttacaaatccatcttgaacaaatttcgttccgtaggtcagagtgttttccacgggacactttgcggcaacgtcagcgaggaacttcttgatgtcttcatcagactcgctgctgcgaagatgtggttggtaacggatctcagtaaacttacgaacattcttaccatcagcaacgtcttcacggccaaggtcaccttcgattgttacccaaaaagctcgtaagtcaaagttacgttttttagctaatgcctgagcagtaattgcttggcaggcaccaaatgacgcaaggagaatttctactggattcatccccgtatttgtactttcaggttcatcaaaggtaatttcaaaaccacgggtacctgctgaaacttgcatccccgttgttgtcttagttgctgttactttatatttactcataaccgtgccctcctttaatacccatagtgtaatcgagacgatacttttggtcaatgagggtgctcaattataaggtgatttcatgtgatgatttttcgccattaaggattgccatcacatcatcaagtgaaatatccaccatatttttgaccgctaaattagtaaagaaggcaatgtgaggcgtaagaataacattatccatttcgtgtaattctttaacaaggggctgatcatcaagcccttgttctcgacgatttgtggccgccaccgtttcttcaccttcaaaagtatcaagggcggcagctgcaattgttcccttttttagggcggcaactaaatcagctgtattaacgactggaccacgactagcattgactaaaccggcagttggtttcatcatttcaaagtcgttagcagtcaataaatctttagaagttggatttaaatcgacgtggagactaacaacatcggcttgctttagtaattcttctttagaaacgaactggacaattccatcgaggtcagtgcgcggattcgtgtcataaccaagaacagtggcacctaatgcatgaagaagctttgccagggttccgccaatgcgtccaacaccaataattccaatcgtggcagtatgaatttccgttgattgttcatcactaaaccagcggaagtcattttcggcgacttggtggtcaaagcggtaagttttccgaagcaaccggaaaatctgcattaatgcaaactcggcgacactccgcggtgaatatgctggtacattggtcacgactaggtcattttcattagcctttttaatgtcgaccatgtcaaatccagctgtccgcgttgcaatctgtttgagcccattggtatggagcttttcataaatatcagccggaactttactacgttgctgaatcacgagtccatcaacatcggcagttaattcaacagcatcgtcaatcaatttcggcgttgtgatgatttcgatattatgttcttttgcgtattcgttaatggcgatttgttcatcgtcccgcacactagtcattaagatttttgtcatgttaatcctccttattaatgaaggctgcaatgttatcaagagctctggttagattttccatactggtggcgtaactgattcggacgtaaccttgaccgccagcaccgaagaaggaaccaggaattacagcaacttttccttcattggcaagatctgtcgcaaatttaaggtcatcattaccatattgttcaggaatcttggcaaatacgtagaaggctccttgaggattaatcagctcgaaccctaatttttggaggttattaacaacaaaatctcgtcgttgctcataggcatctttcatttcttgagtagctgtttttccttcgttagtaccaaatgcggctactgcagcggccattgctggattagaagcagcggttactaacatcgcgtgaatggcactgactgatttcatcaattcttgcggcccagcgataaaaccaatgcggtacccagtcattgcatgtgactttgaggcaccatttaaaattagcgtttgttcgggatgtaattagcgattgaagtatgagtagctccgtaaacaagttccgagtaaatttcatctgcaattacaatcaggttagttgatttaaccgtatcggctaatactttaatttgatcttgggtgtaagtaacaccagttgggttggaggggtagttaagaactagtccctttgcgttaggatgttcttctaggacgctttggagtcttgcgggtgtgagaataaaatcatcgctgcttgtatcaacttcaatcggaatcccaccaagaatctttgtgacagccatgtagaaggggaaagttggggttggaatgataatttcgtcgccaggattaataatggtagaaagagaagcgaaaattccctctgttgcaccaactgtaaccgcaatttcgttttctggatcgtattctagctggtaacgatcttgcataaaatgagcgatggcttggcgtagtgctaaggttccacttcctggagcatagtgtgaatcattggcattgatgctatcgattgcggcctgcttcatcgcggctggtacattaaagtctggttcacctaatgttagtttaatgatgccagggattgagcttacctgataatcaaattcgcggattccaccaggagtgagtttagtgaaattattgttaagacgattaaggatttcttttttagtagctggcatgataaattcctcctatatagtatgtagatttagaaataaaagaagccctgaatgctataggaataacatccaaggcttcttgatcagattggaatgagtataaaagaggctctcggatgtttgggggtcatccgggaacatcacaatgacaaaatcactgctggttagcggacggtaattgcgctaaaccagaagacatacgcttgattcaagtgaattgtcgcagtgatcatcattgtgtcctccttttgattaactgattactaataattctaatcattttttaatttttgtcaagcgttgattgagaaaaactattaattacaaaaatatttattggttacaaatgtaaatataacaaagtttgaaaatgtttgtgattattagttcgcctttagtttgatattaaaattatattctacaattttttttatttttttgtgtcttttttgttgtcttactccacaaatgtgatataatattaatcgtaaaggaagtgagtagcaatgcggatcgacatcaaacattatttggaagttaaccacttgaccatttatcaagtttccaagcgttccggttacggctacacgactttacacaaatcgtttaacaaaccacagtctagttcgacctcgcttaacctgcgtgatcttgatgccttggctcgtgctcaggacaagagcatgtggaaggtccttaaagaactagaagagcattacctcgaatgagattgtggctttgctgtagccacaggaagttaaatgcgttaacttttaacttctagaatacttagactacgaaacttagaaaacaaaatagtatatttaattgaggaggaattgcatatggctcaaaacccaatgaatccatttgacaacgacatgaatgacatcttcaatcaattaatgggtggcatgaatggtttcaattctgataatcggcgttacctaatcaatggtcgtgaagtgacaccagaagaatttgctgaatatcgtagaactggtcaattgccaggcggtgcaaatcctcaacaaggtgggcaacctggccctcaacctaacgcaggtaaggacagtatcttacacaagttaggtcgaaacttaactcaagaagctcgtgaacatgaacttgaccctgttattggtcggaacaaggaaatccaagaaacagctgaaattttaagccggcggacaaagaacaaccctgtattagttggggacgctggtgttggtaagactgctgttgttgaaggattagcacaagcaattgtttccggcgatgtaccagctgctatcaaggacaaggaaattatcagtatcgatatttctggtcttgaagcaggtacccaataccgtggtagctttgaagaaaacatgcaaaagttggttgatgaagtcaagaaggctggaaacatcatcctcttctttgatgaaattcaccaaattatcggtgccggttcaactggtgattctagtggttctaagggtatgtctgacattattaagccagcattatcccgtggtgaactaacagttatcggtgcaactactcaagatgaataccggaacactattatgaaggatgctgcattagcacggcggttcaatgctgttactgttaatgctccaagcaaggctgatactgtagctattcttaaaggtatccgtgacttgtacgaacgtcaccacaatgtaaagttaccagatgacgttctccaagctgctgttgattactctgttcaatacatgccacaacgtgcattacctgacaaggctatcgacttaatcgatatgactgctgctcacttagcagcaaagcatcctgcacgtgatgctaaggcaattgaaaaagatatcgaagcagaagaaaagaagcaaaaagctgctgctaagaaagaagattacaaggctgctcaagatgccaaggaaaagattgctgacttgaagaagcaattgagcgaaaactctaaatctgaaaaggttactgctactccagaagatgttgctaaggctgtagaacaaattactggaattccagtttcaaagattggtgctagtgacgttgaacgtctaaaggacatggacaagcggcttgaaggcaaggttattggccaagacaaagctgttgaagcagttgctcgtgctattcgtcgtaaccgtgctggatttgacgaaggcgattcaccaattggtagtttcctctttgttggacctactggtgttggtaagactgaacttgctaagcaattagcccttgatatgtttggcagcaaagacgatattattcggttagatatgtctgaatactctgaccggacagctgtatctaagatgatcggtgctactgctggttatgttggttatgaagacaacggtaataccttgactgaaaaggttcgtcgtcacccttattcaattattcttcttgatgaaattgaaaaggctaacccacaagttatcaccctcttgcttcaagtacttgatgatggtcgcttaactgatggacaaggtaacactattgactttaagaatactgttatcattgctacatcaaacgccggctactccaacgatgctccagttaagatgggtcggaacgaagatgaagaagacttaattaagaagttgactgcttacttccgtcctgaattcttgaaccggttcaacgccattgttgaattccacagtttgactaaggaagacttgaagcaaatcgttgacttaatgcttgctgaagttaaccggacattagctaagaagggaatgcatgttaaggttactgatgctgcaaagcaataccttattgatgaaggttacgatgaagccatgggtgctcgtcctcttcgtcgggttatcgaacgtgaaatccgtgataaggtaactgattactaccttgaccacctcgatgcaaagaaccttgttgctgaaatgaaggatggccaacttgtaattgttgacgctaaggacgcctcaaaagacgatagtaaagaatatacctcaccatctgaaaaaaaggatgaagaaaaaaacgataagaaggaagaagacaagaagtctgacgaagataagaaagacgaaaagtaattttcctttaatgtagaaaaagacataggatgactctgaaatgagttaacctatgtctctttttgctttaaataataaacattattaatgatctaggcaatcactatggaggctaaaaactaattaggatagttgaaaattgatggtaagatctgattttatgcataaaattattgggattaaggagactctcttttaaaacgaattgcctaaaaatatcgaaaaaatagacaaaaataagtgaaaaaatagtctattttggtgattggcttatcaatccatttattcagacgacaaatatattagcaaattatgattagttaaataatcaatagaccacaagtgctattatatcaacgtttgttcgaattaccagctgttaaataagggctgaatagtgattgtttattaccccactttatctgtatcattctttcacagttgtctctaaataagacatttgggcaaaaatgaaacggtaataatttgtggattttagtgtaaagataaattcgtttagtaacttataattatcgcaggaacagatttgaaaaaatttaaattttttacgggctttttcaaatagttttaaacaacaaaaatgaaatgttgatacatactatttgctaattgcttgattagccattaaatattgatataaaggcatttcaaccatagttgcaaaaatattcgtttgattttcgtttgattaatgaatggctatttcgctaataagtaaagcaacttaacgggtgaatagttaaaatgcaaaatgatcttttcggaaattgcctctcttgtaatccctcaaaaccttgatatagtaggaactgttaagtcattaagcaataaaccttgcatgaataatttattttcttttgaatattttttcataaacgggggtttattaaaatgagaaattcgaatacaaataattggcgttcaactgctctgattgcgggggcaatcttgacagcaggtgtcgttaccaccacttcaacgacagatgtacacgctgataatagtcaaaacaatgcacaagtaagtaatgaccaagttacttacgaccaagttcgagcaactgctgatcagcaacttgcacaattgcaatcagctaatgatagtaaaaaagctcaacaagctacggccaacgagcaatcaaatgctgcggatcttgcacaaaccaacgcacaaattgatcaattaaaagctagtcatgctgctctagaacaagaacaagccggtgctattgcacaagcacaagcttctactgctgcttctattgaagcacaaacttcagctgctaatgctgaataccaacagcaaattaacacacaacaacaaaacgaagccactcaacgtgcagcaaatgatcaacagtacgcacaagctgttagtcaagccgctgaaaatcaacaagctgttgctgatatcgatgcacaatatcaaaaggctttaagtgatgccgctaatacgcagacaagccaagcacaggctgctgccaataattacaactcagctgttgctaaggaaaatgatacttaccaaggtaagctatctgctcaacaagcaactaatgcagaaaatattaaaaatgctgaagcatctcttgcatccgcaactgctaatgctaacaagccatatgaagtcgcaactactaatgatgttgccgttactggtcgagttgctaaaccacaaacagatgttaaagttcctgcttatgtaacaaaatatggaattcatctagaagttcgtggttataatggtgctattcctgtatctgattatacttatcctgaatttgctaatacttactatggtgaataccctgatagtactgtaatcacaaacaaggctgctgaatcaactccacatgatatttcagaaatgccattaaacttccaaccaggtctattaagctatgatgctaaaaatgaccattcagaaaaagtttctgctgatggtttaacggctgaccaagttcaagtattacgggcattagctctttcatgggaaaatggtttccgtaacaatgttttccaaaactaccgtgaattttacaatgtggttaataagaatgatggttttgtaaacgttgctccagttaatttagtaagtactgactttactgataacattgcaaatcaagttgttgctaaccggacaaagtacaatattgataataataaccatactgttatcagcagtggaatgcctgccgaagcaacttatactagcgttattaatgatgcaaccaagaacttgaaaaagaatttaacaagtgaattcaatggtaagacagtttacactgacgttaacgaaaacttaactactacgcaagctggaacgccaacccttcttaattacgctattaatctctacaactcaatgcagggtatgtactatggtgaattagtaaacccaacacacatcggtggacatgcagttaaccttctttgtgctggtgttcgaactgtgggaattggtttccaaaagttgactgatgaaatgactgctaagaatggatcaggtgtttctgatcgcaagaacccatcatatgctgtaacgtttgatcatgtcggatttaacattgatcatgatgctaacttaactaaagaagttcaaaaccgtaatgtatggggtacttcaactgttgatgcgcaattaaatactattaagactgctcaatatcacgttaataaggtgccaggcacaaagacagttacgccaactgctactgatgtgcaaaaagctactgctagcgaacaacaaaaattagctgatgttaaggcacaagcacaacaatcccttgatgcgttagctagtgcccaccaggctagcttaaataagcttgcacaacaatataatgatgcgaaggctcaagtaaaggctaactatgatgttgcagttactaaggcagctagtgttcgtgacgctgcccttaaggctactggagttgttgatcttcaagcttacaaagctcaattagacagtgcctaccaaaacttagtaaaggcagaccaagtagctgctcaaaaacttgctgctgatcgtgacgctaagatcgccaacatcaagaaagctgaaaatgtaaagcttgatgctaagattaatgaacttgttccaagcgttgatccacaaatcaagcaattacaagatcaacaccaagcagttattgctcatggtgatgctgttcttgccgaactaaaggctgaaaataaggctgtttataacaaacttgctgaacaattcaatgttcaattagcagctattcaacggcgtgaaaatgctaagagagctaatgaagttcgtttagcaaataatactgttgtccttccttcagcagtgaaagttgctaatgacggtaatactgatactgttgccttcccaacagcttcaaaccctctacaagctgaaactactggacgtgttcaaactgtttcagcaccatcaattgtaaagacagctacacaaacacctgttgcagttacaccagttgttactacagtaaatcatgctgctgaaaacactgttaagagtaatgaaagttcagctccagttgtaacacaaaccactgcagttaatggtacacaaacatcggttgcttctactgctgataacaaagccactaaagcagacaacagtgagaagtcagttgtaaaagctgatactgttgctaagaagagtgaatcatcacaaaaggttgatcaatcttctatgtcaattgttgctttaactaccactgcattacttggtacacttggtatcacttacagttcaaagaagcgccacaactaatccgaaacgattaataaatacaacaaagaggctgagaatatcccaacctctttgttattttaaactgttattctcttttgtatcctatagcttatcaatcaatggttgcataaaattattattgattcgggtaagcttatgatggtttcctaagtttagttcataggctaatcgctcgggatcattttggtcattaactttaatgattcctcgtttcttaaagttaaaattttcggcaatgtgctgcatcgctttattgctgcggtgagtatcaacccgaaaattcttaattccttgcatttggccaactgttagtaagttagaaaatagcaatttactaagtccttggccccgataattactgctgatagctacccggtggatggtagcataaggctcatctggttgttgccactgtccctgtgtaatgttgcggtaggttggttcgggtgtaagttgaagagtcgcagtagccactactttattatcattaattaatatccagtttgtttgcatcacaatatcttgagtaaaggtttcctgatctggataaccgttttgccattgcggactaccatttttctttagaagctcttttgcatcatcaattattttcataatcgccgttaaatcttgaagctgggcgcgtcgtaaatatatttctgccattattatcctcccctgattaataatatttctattgtacgacatttagccttattcagcggagaaaataagcgagattatatttcagaaagaagtggtttgcgttagaatgaaaagcaatgaaatgaatggaggataagcgatggcattaacatggacaattatttggtggtgtttgctactggttattctcttcaatgaaattgcggccatttatactgttttccgcgaaaagcgggatattgctgcaacttgggcatggttattggtgctaacgctgattcctggttttggctttatattatatgcattctttggacgaaaattaccacataaacaattagcccgaataaaatcccaaacgcaactaaaattaaaacaagcactagaaaggcagaagcaacaattcatcaatatgccgaagcctaaagatcaaaccgtccagatttatcggcggaccatcatgctttttcaaagtattgatgactcatttttaacgcggcacaatgccgttaatatttttacaaatggtaatgcgctttttaagaaaatgtttgatgatattgcagcagcaaaaaagagtgtccatattgagttttatacaatttataatgatcaaattggtaatgaattacggacgttacttgaacaaaaggccgctgagggagtagaagtgcgagttctctacgattcatggggatcgatgggagtctggccaagtttttatgatcatttacgtgaagtcggtggttatgcggccccgttcctgatgtcgcgaagtaacttctttgattttcggataaactaccgtgaccaccggaaaatcgttgttattgatggtgagattgggtatgttggtggttttaatgttggcgatcaatacctaggacgcgtttctaaatttggtccatggcgtgatacccaccttcgaattgtcggtggtggcgtttatggtcttcagcgacggtttatcggcgactggaatgcatcaatgaaaaaggatgaagataagattgtgcattaccatccttactttcaaccaattagagttcatggggacgttgcattgcagactgtctctagtggtcctgaagcgccattggaaaaaattaaaatggggtatttacgtctaattaatgcagcgcaggaccatatttggatccaaactccctatctgatccccgacgatagtatattggatgcgttaaaagtggcagctcattcaggaatcgatgtacggataatgattccttcaatgccagatcatgcttttgtatatcgggcaacgcagtattatgctcgtgagctcgctaatcatggtgtaacaatttattactatcaaaaaggtttccttcatgccaaaacaatgatgattgatggtcggatggcttctgttggatctgctaaccttgactttcggagttttaaattaaacttcgaaattaatgcctttatttacaatcaaaatacggtagacgatcttgagcgaatttttgttaatgatattcgtaactgtcgggtgattacaccagcaatgtttgcagagcaaccacgctggttgaagtttaagcaaacagtgtcacgtctgctgtccccaattttataatgatagaacagagctgtgacattagttaggtcacttccacaaaatacgaacagcgcagtacaacaatggccttcagcgtccggcaaagtcgaacgctgaaggcctattgttgcttgcgggagctcgaaaacgaagtcacgagtgacttctgtctcgctcccgtttttagctaaagaatatatgttcgttttatgataaaattagaggagtaatttaggcgatagaaaggattaaagattatgggaaccctgggatttgttttaggaacagcagcgatggatcatcagcaagtgttgattgatcaattagttgaccagataaagaatgcatctgctgatgagagcttttattatttggtgcctaaccatattaagtttgaaactgaaattaatgtccttgctggtcttcgtgatcgtcaaggatttagcggaagtgacagattcgcctcttcacgcatacaggtactttcgtttagccggcttgcttggtaccttttacgagatactccagcttttcaaaaacaacacctttctaaaatcgggatggcgatgctcacttcccaagttgttcaagaacaggcaagtgagctccgtttatatgcaagcgaagtaaaacaacctggctttattcaaaagatgacagctcagcttgaagaattaaaaaatgctaacataaccgccgatgacttaactgatattatttcccgggtgaagtccgcgaatgacccagcagctaatcaggcgtggcttgctaaaatgcatgatgttgagattatatatcatgcttatgaagatcggctacgggaccggtacattggtaataatgagttatatcggcaattagtgtcttaccttcaaaaatcaccagaagctgctaagatgcacttctttattgaccgttttgctcagtttactgcaaatgagcaacaggtagtggatgcattaattacgaatgccgcatcgacaactatttctttaactcttgatcgtggatatccagatcagaaccatccaaatccccaggaacttcctcctaaaaataacttgttttattcctccgcgatgcaatttcaccgtttgtggaaatttggtcaaatgcatcaaaaagaagtaaaggttttgcaaaatgtagcgtttgcgacgactcctcgtgttggtgcggaattacaacaagttgattcgtattttaagcgttatgcaagcgaaccaattggccacagcgagcgggaagacctttcttgtcccccaaatattcaatttatgacaactaccaatcggatgactgaattgaataatgtggccaccaagattcgccaattagttgctagtggtaaatatcgttatcgtgattttcttattcttagtcgccaccttgacggctatcagacaatgattgaaccagtttttgcggcacataatattccagtttttaatgaccatgaacgcttgatggataaccatccactagtaacacttcttacgacattattagaattaccgcagcggggctatcgaacagcagatatcatccaattgctgaagacatggttacttgttccacggacaggcactggcgatctgatggggctaagtgatttccaagcagctgttttcgccactgagaattggtgccttaagcaggcaattgaaggaaaaagtgcttggacaactaatgatccagaaaagattaagcaattatggcaggcacccggaacgaacctaacagaaccaaaatatgcgcaatcacggttgaaaaaattaaatgaccagttagcccttgtaaaagattttgttgcgaatcacttattgccagttttcgaccagtttaaacaagcacaatcaggccaagaacttgccactgcgttataccagttcttggccgctatgggagttacagaccggttatacgcttggcaacaataccaaagtacccgagatttagaccttgcgcgtcaaccacaacaagtctggactaccttttgccaaattctccaagaatatgtggaaatcttgggccaacaagaactacgggatggaactagtgaggtccttgcagattttagtgaattgctccaggcagggtttgcggctgcccagtattcccagattccggcaacgttagatcaagtggtagtctctgaaacgggaattgtccaaagtgaaaatcgaaaagtagtttttatgattggatcgactgatgatgtgatgccagaaatgcaagaaagcgatagtttgctaactgaccaagataaggatgttttgagtgcttatcttgatgaagatttccaataccttcctggaacggcaattgaccaactgattgatgagccatttgttcactatactggttttatgaacgctaaggaacagttgattttctcggcaccgcaaactgatagtgatgataaggaactcagtatatcgccatatatgcatgatatgtctcgctactttggtcaacctgttcgtgaatatccattagctactagcaaggccggacaagagaatgctattgattttgtaagtgccccactcgcaacaataaaccggttagtcgaagttagccggcaaattcgtgatgagcaaggagttggcattgatcgtcaaccggttatgcccgttggatggcaaacagttgctgaatcgttggttaagttagctaagcaatggcaacaatcagcagatactaaggttcaagcagaaggaatatcactaggtcagcgtctatctttagttgctgcgggctttcattatcaaaacaagattgattccctgggaaataaattggctcaggcactttatctccgaacggcacccgatgatgagcgtggacgggtattatatgcctcaatctcgcagttacaagatttttatattaatcagtacgaatattttcttaagtatggtttacggttgcaaaaacgagatgagttaaccttatctaatgaccgtatcggcaccttcttccataaagcgatggagacttttgttacaacaattcgagaaaataatttgtcatttgcagatcttgcccacgaagataatcagatgcaacgtgaccagctgattgaccatgcattagttacagctcaaaagaatcagccaactttattgcgtctcattaattcttcagcccaagcccaattccaatatcaacaattaaccgcaattgttaaaacaatgttaattacattatgccgccaagctgaatataccggctcacaaccagttaaaaccgaagttcagtttggaagaattggtaaccagcagccgggcaaccttggctctcttgattatcaacttaaagataatcatcatatttatctgcggggacgaattgaccgaatcgataatcttaagcaaggaaacgacaatttcttgacggttgttgactataagtcgagtaatcatctttttgacctcacttcggcttattatgggctctctctccaacttttaacctaccttaatgggttacaggcaaacttagctgaattggaaacgaataattcacgactggcaggggcattatatcttcgtttgaataatccgacaattaaggctgccgagttaaagaagagttccctcgatgatttgaaattaaaagagcaccaatacaagggaatcctcttgaatgatccacaattattgcgggagttagataagagtttagataaacaggcattcttatacccccttaaggaatataagaatggaaaaattaaagctaataaagaagcgcttctcgttacgccgcagcaacttgattggttgcaaaacatgaataaggaacttgtgattaatgcgggtaatcaaattttgagtggtgacttgaaactgaatccttaccggttattaactggaagcaaccgtcgtacaggacttgattacagtgactttttagacgtatttcagtttgataatatgcttgaccagcaaaactaccgcgacctaaatcctaatttagcaaaagaagcatttgataatgtagttcaagacgatgatgaggaggataagaagtaatggctggatttaaaccaacgcctgctcaatccaaggcgataaatgaccgtggcgaaaatatcctagtttcagcttccgcgggatcaggaaaaacggctgtgctagtaaatcggacaattgaattgattaaagaagggcaaagcattgatcgaatgctgctcgtaacatttacggacgccgcagcaaagaatatgcgggataaaatcagggcagccttgcagaaaatagtacaagattcagctaatcccaaagatttacgtgaccggatgagtaatcaaattaaccggcttgcggctgcagatattagtacaattcatgctttttgtttaaagttaataaagcggtactattacttgattaaccttgatccacaatttcggctcttaactgacgaaacagagcggttattacttcaagaagatgtctggcatgaagttagtgaagaactgtataaaaacgctgaagaaaaagttccgggcagagcttcctttagcgaactagtcctcaacttttctagtgaccgtgatgaccaaggactcgacgacttgattttacggttatgtgaaattgctaatgcccaacctgatcccgaaaagtggctccaaaaattaccagataattatgatttagggtctggctcactattagaatctaatttttatcaacaacagctaaagcccctggttatcgaaaagctcaatcagctcattcaagattatcgtgaattagtaacaagagctagtgacaacggtctagatcaagcagccgaagttattaaaagtgatgaagaattgatgcatcaacttctttcttcactcggggggattaccgtcagtgatgtttgtcaaatgatggcgcagcaaaaatttggtagttttcggggacgaccagcggcagatgatccacggattgatgtatttaaagacattcaaaagcagcgtaatcagctaaagaagcagtgggaacaaacagttagtatttacttgggaaagcaggaagcacaggaaccaattgcaaaagaagaattgctaactgagctaacgactttccgtgatcaatttacagccttgttaagcaaagcaactgaaagtcaattagacgctaaaactgttgattcattgcaaaaagaccagcagatgatgcaggagcttttagacttattgcaaccacctacctggaatactattcgggacttatttgctaatgctaaatttgcacgaatgggcggcaaaccgaaagacgatgagctagctgaagaagtatataaatcactgggaagtactcgaacggggataaaaaagcaatttgatcagttggttgatcgcttctttaattatcgtgaagaccaatttcgattaatttcaacgaatgcccaggaacttttacgcgaattgagtgcggtaacgattaatttccgtcgacggtatcaacaaaccaagttaaatcggcatgtccttgagtttagtgacttggaacactacgcgtacgctattttaacgccatcagacgaccagccaaactggcaaaccctcgtcaaagatctgcaaaatcattatcaagaaattatgattgatgaataccaggatacgaaccgccttcaggaaagtattttgatgaaattgacatctcctgaacgcaagaatctatttatggtaggggatgttaagcaatcgatttaccgattccgtgaagctgatccaacattatttcttgggaaatatcaaaactatcgtcaaggtaacgacggggaagcgattgttttaggggaaaatttccggtcgatgactaatgtgacgagctttaccaatatccttttcgaacaactgatggatagggaagttggtgaaattgattatgacgaagatgcccatttaaaatatgcggcaacttattacgaagaaaatcaagataataaggttcacccaacagaagtgttactgtatgacgccaatgctcttgatccagaaaaagaagatgttgaacatgaggatgataaattagctggagaatttcggatgatcgggatgcgaattaagcagatggtcgaaaatcaagagttaatttttcatccagaagatggacagatgcatccaattcagtacggtgatattgttttgcttgagcggacaaaggcaattaataattcattgatggaagagtttaataaacttaatattccattgacagttcacgatgttgaaagttattttcaagctactgaagtgcgagtaatgatgtccttgttgaagataattgataatccacaacaggatattccattagctgctgttttgcgatcgccgattgtcgggttaactaaccaagaattagcttttatccgtcttcagaatcgatctgttgattactacgctgccttgcaatcatttatgggtaattaccagcgaaaggctcttcaccatcaatcgctccttacttctgaacaggtaagtgccctctatgaaaaagcagaccacttcttaggcttgcttcgtgtttttcgacaaacagcccaacagcaaacccttgttgacttgatttggcagatctatgaccaaacaggttatcttgattacgttggagcaatgccaggaggccaccaacgacaggcaaacctccatgccctttatcaacgtgcacactcttatgaacaaagcagttttaagggtctttatcaatttattcgctttattgagaaaatgcaggaacatgataaagatttaggcgtagcaccgacacagttaactgcaaatacggttaatgttatgacgattcacggaagtaagggtctgcaattccctgtggtatttctaattgatgccacacatggctttaacaaaggagcagctcgtgaaaatgcagttgtcgatgctgttgcgggggtaggaattcgttacatggatgatcaacgggtcatttatgacacgccgcaacgacaagcagtgattgaagaaatccagcgcggcgaacgagcagaagatcttcgggttctctatgttgcattgacccgcgcagaacagcggttaattattacgggatcctttaatgaagaaatgcggacacagagtcttgttggttcatggcaacggtggcagaaagcatatcagagtaagaatttactaattggcccgcaaccacggatcactgcaaattcatttatggactgggttggccttgcactagctcgttatccagaattcaacgcgcaacaattgagtcgtggaaatgtcacgctagaaaaaagtactcttgctgatactaaagttactggtttggcggctgatcctcactttattgcaaaaacatataccgcacttgatgttagcgatggattggcaaaaattgggcaaaatgctagtgctaatgtaacggaaaagaacaatacagtcgcaactgatgcttctgaacaaaggattgatcaaattttgcgttatcgttacccccatcttgtcgctactaaaacaactgcttaccaatctgttacagatgtaaaacgagtctttgaagatcctgacacacgtgatatggcgcggtgggattatgatcaacaacaaagggtaaagacgcaagggatttacttaaataataactttgacgttccagctttcattcagcagactactcatgaacccgtggcaacagaaattggaacagcaactcaccttgttttccaaaaacttccgcttgatgaaggtccgattaacgttgaatttgttgatcaagaaattcaaaaattagtaggaaaaaaactgatcaatccagttgtagcagcacggatcaaccggaaaggaatagtggacttttatcagactgaggttggtcaaaagatcttaaagcatcccgcagattatcatcgtgaagtgccgttctcaatgattatgaatggtcatgaattatttaaaggggtaaatgttagtgatgatgaacgcattttaattcacggaatcattgatggttacttaaaaaatgacgagggcattgttctagttgattataaaactgatcaccttaacaaagattatcgcgactttgatttagcacggataaaggatcgctaccgaggacaattagagctctataaagaagctttgaacttaatggaagggattccagttgtccaaatggggctttacctgttagaattaggagagttcgtgttatttacaaaagagggtgattagttggcgacaattaaagatattgcacagaaagcaggggtatcggtttcgactgcttctcgagctttaaaccataatccacgaattagtgaaaaaacacgacaacaaatagcgacgattgctaaagagatgggatatcaaccaaattacaatgcacagaacttaacacggggcgagtcaaacatggtcggaattatttttccagtaaccagtgatactgcgcctgccaatccgtttcatattgacttattacggggaattagcatggcattaaagccgattcactatgaaatggttgtggcaattgcgccaactacgaccgaccttttgcaaagcgtaaaatcgatggtcgaacagtccaaggtgcataactttttagtactttatacggttaaagatgaccccattactaattacctgcgccaaaataaccttaattttgtggtaatcggtcatccagacaaggcccaagatcgctttgtcgacaatgataacgtagcggcagggcaagcggcgactgattatctgatggatcatcaggagactagtcaccccgtctttcttcaatctgcaagtaattgggtatttgaacaggataggcatcaaggttatgagcagagtatgcaaaatcatcaccttcctgctcttagctggcgatattcaccaacgggaccgcagttaaagattttattaaacaacatccgcaaatcgattcaattgtttgtgttgatgacttgttgctggtacgattaatacggcaactacaagaatttaatttaccaactatttgttttaacaatagtcggttgatggggatgttaattaatcaagaagaaaaggttgacttacaaccccgcaaattgggtcaacaagctgttgaattactttttaatccagaagagcaattccgaatcgttgattttaaaataaatagttgatagaaaggaccacggaattacttgtcacggtcctctcttatttttatatggagggaaatcggaatggagaaggtttacattgttgctgctcagcgaacaccaatcggtaagtttaacggtcagttagcttcaaagtctgcagttgaattaggagcgattgcaattaaagcggctgttgaaaaggcaaagctcagcggaaacgatattgaccaagtattaatggggaatgttattcaagcaggaacgggacaaaatccagctcgtcaagcatcaatggccgctggcttaggtgagcaggttccggcaataacgattaatgacgtctgtgcgtcgggaatgtccagtgttaacctggcagcaagtttaattcgcgcaggacaggctaatgtaattgttgctggggggatggaaagtatgtcccaagccccatatgttcttcctaaagcacggaatggttatcggtttgggaacggaaccttacttgatgcaatgcaaagtgatgctttaaatgacgtttatggcggttatccaatgggaattactgctgaaaatatcaatgataagtatcagattactcgtcgccagcaagacgaatttgctttgtcgagccatcaacgtgcagtaaaagctcaaaaagcaggctatttcgattcagaaattgtgcccgttgaagttaagcagaaacgaaccactgtaactgtaaaggttgacgaagcaccacgaccagatacttccctagtggctttagcaaaattaaaaccagcttttaaatctgacggaagtgtgactgcaggaaatgcctcgggaattaatgatgggggagctgctttggttcttgcttctgaaagtgcagtcaatcaattaggattaactccattggctgagtggcaaggatctgcagttgttggtcttgatccagcattgatgggtctgggaccatattatgcaatcaataagctcttaaaaaatcagcagatggcggcggatgacgtggatacttacgaaattaatgaagcgtttgcgacccaagcccttgtctgtcaggacttgcttcatcttgatcctagtgctgtcaatccttggggtggagcaattgcgttaggccatccagttgggtgttcaggcgcgcgaattatcgtcacgatgattaatgaaatgcattgggataatcatgaactcggcattgcttcgctgtgtgtcgggggcggaatgggtgaagcggttctgcttaagaaaatttagtaccaagaataacattcatcgtaaaaggcaagtaattgaggaaaattgaagtttttctctattacttgccttctttattttattaagttaaatacgttttaaataattaactataacaggcctgttttgcgggagctaaacagtaataactttaaattataaaaatccacaaccgttttctaaaaatttgcgcaagcggttgcacaacgattttaaatttgatattattaatattgcaataatgtatgaagcgcttacaataatcataagtgtcttttagaactattttataagttaaggagttgttagcaatgagtcaagaaaagtccacgggggctggattacctactctatcaaagagtactatctggatgatcaactttggattccttggtgttcagacagcttttactctgcagagttctcaaatgagtcggattttccaaactattggtgccgaccctaacaaccttggctggttcttcatcttaccaccattagctggtttgattgttcaaccaatcattggttattattcagaccgtacatgggcaccaaaattaggtggtcggcggttaccatacttactactgggaatgattgtagctgttatcgttatgattttgcttcctaattcaggaagtttcggtttcgggtatggttcgctcgctgccctttggttcggtgcaattactgttgctttacttgacctttcatcaaatgtggcaatgcagccatttaagatgatggttggtgatatggttaacgatgaccaaaagagttatgcctatgggattcaaagtttcttatctaacacaggtgctgtgttagctgccgttttcccattcattttaactgcttggtttggggttcgtaacactgcaaaacgaggcgttgttccagattcagttattatcgccttctacgttggggcagccttgttagttgttactagtttatttacagttttccgggttcatgaatatgacccagcaacttacgcaaagtaccatggtatttctgaagatgataacaaagagggtggaaattggttcacactcttaaagcatgcaccaaaggcattctggacagttacccttgttcaattcttctgctggtttgcattccaatacctctggacatactcagctggggctattgccaaaaacgtttggaatactgttgatgctacctctgctggttatcaggctgctggtaactggtacggtgtacttgcggctattcaatcaatcgctgctgttatttggtcatacgttttagctaaggtgccaaacaagtaccacaagcttggttacggtggtagtttacttcttggtgctcttgggttcatttcagtgttctttgttcatgatcaatggacgttgattgtttcatacacccttgtcggaattgcttgggctgcgatgaacacttacccattaacaattgttacaaacgcattgactggtaagcacatgggtacataccttggattattcaacggttcaatttgtttaccacaaattgttgcttcattattgagttttgctttattcccattatttggacactcacaagttcacatgtttatccttgctggtattgtaatggctcttggtgctctttcagttgccacaatcaaggaaacttatgctgaataggagttatttaataaaataagttaattaagttataataaaggcaggttaaagactacctttatttcagatgaaaggaattgagatttcaatgaaacgtacatttgatattgccccttggcatgttgctactcacaaatgggacccacaagacaagcgtttacaagaatcaatgactagtttagccaatgagaatcttggtatgcgtggcttctttgaagaaggttacagtggtgaccatatggaaggtatttacctcggtggagtttggttccctgacaagactcgtgttggttggtggaagaatggttatcctaagtactttggtaagatgatcaacgctgtcaacttcatgaagttaatcattaaggttaatggtgaacaactcgacttagcaaagcaaacaccaaaagactttaagcttgatcttgacatgaagcgtggtgtcttagaacggtgttttactgttgaaattggtggtactgaaatgtacttcaattttgaacgttttgttagtgttacccaaaaagaattagttggtcaacgtctccacattaagaaccgtggcgacagtgatgctaaggttgaaattactagcatgattgatgctgatgtatacaacgaagacgctaactacgatgaacaattctggaacgttttaggcaagtctgctgatggcgaacatgctgaattaacttctatgactaagaagaatgattttggcactccacaattcatcgttggaatgaagactacttcaaagactaaccttgaccacgtggatgacggcactgacgaaaaacacgcttacaacacatttgctggtactgtagctgctggtaaagaagttaactttgaaaagcgcagtatcgtaatgacttctcgtgattacgactcccaagcagatattgaaaagaacttggatgtattaggcgatcaacttgataatcaaagttttgacgacttactcgatccacatattaaagaatgggcagatcgttgggttaagtctgatgttgaaattgaaggtgacgaaggagctcaacagggtattcgtttcaacctcttccaactcttctctacttattatggtcaagattaccgtcttaacatcagtccaaaaggattcactggtgaaaagtacggtggtgctacttactgggatactgaagcttattgtattccagtttaccttggggttgcaaacccagaagttgcacgtaacttattaatgtaccgttacaagcaattagatggtgcctttgttaacgctaaggaacaaggacttgatggtgcattattcccaatggttaccttcaacggtatcgaatgtcacaacgaatgggaaattacctttgaagaaattcaccgtaacggggacattgcctttgccatttacctttacactaagtacactggcgacaagtcatacgttcttaacgaaggggcagaagttcttactgaaatttctcgtttctgggctgaccgtgttcactactcccaaaacaagaacaagtacatgcttcatgccgtaactggtcctgatgaatacgacaacaacgtaaacaacgactggtacactaaccttctttgtcgctggactcttcaatacacccttgacatcttagaccaagtagatgaaaaggtagctaagaagcttaatgtttcagaagacgaaaagcgtaagtggaagggtattgtagacaacatgtaccttccttacgacaaggaaaaggacatcttcccagaaaacgatggcttcatggacaaggacttgactccagtttctgaaattccaagtgaccaattaccacttaaccaacactggtcatgggataagatcttacgttcaccatacgtaaaacaaggtgacgttatccaaggtctctgggacttcatcgatgactttactaaggaagaaaagaagaacaacttcgacttctacgaacaatttactgttcacgaatcaagtctttctgcttcagtttactcaattatcgctgctgatattggttacgaagacaaggccgttgaattgtatgaacgttcagcacgtcttgaccttgataactacaacaacgatacttctgatggacttcacattacttcaatgactggttcatggcttgatattgttcaaggatttgctggtatgcgtgttcgtgatggtcaattacactatgcaccattcttacctaagaagtgggattcataccaattccgtcaaatgttccgtggccggatcttgaaggttaaggttgacaagcatggtactaagattgatcttgtatcaggtgacccaattaccatcgatcttgacggtaagaagcttgaattaaagtaattcttggaggcatttgagatgaagtttgaagatttgaaaggttttgcatttgaccttgacggtgttattgctgacactgctcgttttcatggtcaagcatggcaccaattagctgacaaggttggaactgaatggactccagaattggctgacgcattaaagggtgttagtcggatggattctttggaattaatcttgaaggctggcggccatgaaaatgactatactcaagaagaaaaagaagctttggcaactgaaaagaatgataactatattaagttagttgaaactctaacacctgctgatattcttccaggaatgaaagacttcttagatgaattgaaagctaacggttaccacattgtattagcttctgcttctaaaaatgcgccaaaggttcttaagtatttgcaattaactgattactttgaaggaatcgttaatccagcaaacttaagccatggtaaaccagatccagaaatttaccaagaagcagctaaattaatggatcttccagctgaccaagtagcaggacttgaagatgcccaagccggaattgaatcaattaaccgtgctggtgaattatcaattggttttggtgctgatttgcaggatgctgatgttaagttcgataagactggtgacgtatccttagctgctattaaagcgcaaatgaattaagatccaatttctctcttttaacaatccgtaaagacgtacttagaataatctaggggcgccttttttatgtgaaattatgaaaagaaaaatcgttataataacaaccatcattctaattagttgcttatgggtagtagttgcaattaactttaatcggccgtcctttcagccagttcaagatgaaacacagtcaagtcaacaaccgcgaccaaaatttaccgaccaacaaattggggttttggcgggattggcaatatctcccgactggttaaaacaaaatattgctgcaaatcaactcgtttatggaattgttaagccctctgataccgttccagcaggagtaaatgattatagctatttagtagccgctgacgaccaagatggaacggcaattttctttaaagttgaaggccagactgtgatcataaaatatacttctcagcgaaatgcaaaattaaaaacaaaggacttaaccttggcgcaactaagaaaagaattctaccaaacgaggtcacaaaaaaagcaagtagataactatgtagcaggattgcggaccgagtaaaatttaaggcatcttaaaaatgctattttcagggtattctttagtgatgagtactgtataatattcaaattaaaggaggaaactgtgatgtcaatttatggcccatatgagcagattttgtcaaatattctttccctcacaactgatcggatcaaagaactaaatcagcaaacagtgcaggataagcaaccaaaactttatgaacatttaattgctcgggtgaagacttccgagagtatggcggaaaaatgccaacgaaaaggctatccggtctctactgaatcggccttacgaaaatgtcgcgatgcagttggaatcagaattgtttgtaactttatcgatgatattgaccgttgcctttgccaattacgtcaagctgactggtgtgaggttattaaggaaaaggattatattacaaatgcaaagccaaatggatatcggagctatcatgtcattattgatgaaaaagttccatatcaagatatcgaaggaaataacccgggacatttttatgttgaaattcagttacgaacgattgcaatggattcatgggcaagtcttgaacatgagatgaaatataaacataatattaaaaatccagagcgaattggtcgcgaacttaaacgttgtgctgaccaattagcatcatgcgacgttcaaatgcaaacaatccggcaattaattaattctagtgaggaaggcgaataagatgcgaatccttgtagcagaagatgaacagcagctatctcatgtattaagttcagcgatgacagcgagtggttatcaagttgatattgctaataatggccaagaagccgttgagcaggcgaaagaaaatgcctatgatgtcataattttagacatcatgatgcctgttaaatctggactggaagcattaaaggaaattagagcaactggtaatcgaacatatattatgatgttaacggctatgggtgaagaagatgataaggtaactggtcttgatgccggtgctgacgattatttaactaagcccttttccttaaaagaactacttgctcgtttgcgctcccgtcaacgccgagatgattcttaccaagtagatgttcttgaatttggtgatttgacccttaacggtaacgatcaatcgcttgaaagccataattcgattagtttaacgaatcgggaaaatcgtttacttcagtattttattttgaatgctaataaagaattatcagcgaatgaacttattaaccacgtttgggatgagaatgaaaccgctgatcaagaagatctctggattaatatctgttatttacggcaaaaattacaggcaattcaatctcaagtaacaattagtggtgaaaaaactggaccgtttatgattgcatgctagggggtcaaggaatgattcaacgttttcgctataaatttattgcaatctcaactgcggcattattatttgtaattttgacaattgttggcagtatttgcaccctcacttactatcaatcgcaccaagaaattgaacgggtattgacgattttggtaaataacgacggccaaattccccgaaaagggatccggactactgacaatagtcaacctcaattttcacgtgagggccttcatcaatatcgttattttgctgtactggttgataataaaaatcaagtaacggaagtgcaagatgatcatattgcaacggttacgccgcaggatgcccgagcaatgacagaccgtcttgtaagaagaaaagtgcatagcgggcagttgctatatcgaggggtaaattatgcttataagattcggaataaaaacggcgagaaagtaattgtctttcttgatgaatcactcctcatggcccggacacgatcactaatgcatacagggttgatcttagggataattgttttagttctgtataccattgttttaaccctttactcgcgtcgtgcaattcggccaattattgaagcagagcagcggcaaaaagaatttataactaatgctagtcatgaattaaaaacgccattgacagttatttcagcgaataatgaaatgcaagagattatcaatggtgagaatgaatggacaacaagcaccaagcaacaggttactcgcctgacaaagttaattaataacctggtgtcacttgcacgcatgcaagaacaaccgacattaacgatgttgccggtaaatgtaagtcaaattgccggggatgtggctagtagtttcaagagtgtgatttcaaccgaacagaaacaattcaatgtacagattgatgaaggcttggtagcaaacgctgatgaaaatacactacgggaactgttgaatattttgcttgataatgcgaataagtattgtgatcctcagggtgaaattgattttacagtgtcctcgtctaatcatagtaaaaatatagttattacgattgcgaatagctataaagatggtaaaagcctggatgctaaaaaattctttaaccgcttttatcgggttgatgaatcgcatactcaaggaaaaaaggcaggctttggtattgggctttcgatggctcaatatatcgttaaacaattcaaagggaaaattacggcgaagtatacaaatggtaagttagcttttatcgtaacgttaaaagaagtaggaaagtaagaatgaaattttggcgacttaagattggaatatatgcagttgtttggagcctaataattggtatgctgacagcggcgtatttaaacttagttaactgggtaattgatttagtttggcatcaatacctagatccggcagttagtagtaaatggtatccgtttttagtatgtattccatggtggattatagaatgaagttagccacccagttggtggtaaataaaaaacgccattcggcgtgacatcaggtatcatattaagtgaaccaaacctatatgaaaggatgtccgtcaaatgacgcacttaaatgataccatgtctactagtttattgactactcataaaaagaatggtatctgtcaagttttcataggtagcctttaaatatacagttttagtgggttagtgccttaaaaagttgtcccattggtctacttgtggccgtgttaatcggaattattccttgtactgctccaattgacggctttgtcggtgcctttcttagaaactctccagttcgaatatgcatttcctgtaataggctggtttgagccactcgaggatgaactgttaattgttctaggattgtatttaaactagcttgcagttcaccattcattcgggcttcaattaaaccaatcatggctttagccccctgcttagtccatgacttgccctgtttcttcatccggtaagtaaaagcccggtgagaactttcgactgaaccaattaaatgaatatccttaaatccacgcatttgtggtgagaggatataccgccaatttcgctgtagatactttcttaaacgcattaggtcgtctgcttgtttttccgttaggttttgtgattcataagtatctaaaattattgttagctctgcttgatcatgatgacgaacggctttaattgctcgcatggctaattcgttgtgccggcctaaagtatgttcaattttctgtaaacaatgatagcggtcgagaaagtattcaccatgtgcaccttgaggaactagacttaatagcttagctggttcgtaacctgggccagcgtcactggccaaaaagatcgtttgaccggcaagcttataatggcggtctaaataatcacttagtcgtgcttcaagccgtccttggtgcccaacactgagaaagtcatgccgattaatgatttgattagctactcgctcataaacccgataatggtgcacaagagtcagctgacctgcttcttttttacctttaatcataaaggcatcaccctcaatagttaaatttttaggcatatggcgaggagtagcttggtgttcttttgcttgagtttgtttagctacctgatttcctaactcatgcacggcgtgcattaccgaatcggcagtaattccgctgtcaaatacaaggttcaaaatgtcggcagtattgcgcattgtagttgtttgggcaatcttagccatcatcattaagtagtgtggcgataaacgacgacgtggtttaatttttaattgttggtctaagtaaaattcacgtttctttgtcccagcctgataataccgtcgttgaaaagtcaccgggccaaagataaaattaagcgtccgtggctgtttattaattacttgatagttcgctggagcttgggactttaagcttcgatctaagctttccaaaaagttttgcatgattacttgtcctaactccaataccccttttaaaataatctgttcagcttcaaataaactgcctgatttcaccaaattctgctcgatttctgttaaaatatccatgaggaaagacctgcctttgcttagtattcgacacactaaaggctactggtcttttctttttttgccaaataagtaaattggtctacaaaaaagatttccacgaccagatgaattattcatccaacctatgaaaatcttacactaacaaagaatgctcatcttactaaagaagaacgtgtgatgattgcgactttaaagtcgcaaggactttccaatcgcgcaattggtcgccaattaggagttaatcatcaaacaattaataacgagctcaaccgtggtacggtccgccaacttcgtcgtcaaaaatctaatggtaagatttacgaatattcttactacatctatagttatgaagccggtcaggccacatatcttgaacatcaccgccattctggtcgtcgtcgcttatattattcttcaaagcaatttttacgattagctgatcagctaatgcttgttgagtttgacgaccaccattactccccacaagcggttatttataaggcccgagatttaatgaatgatggcaccctgatcccaaagtcggttgtaactttatatcaatggattaatgagggtgtgcttcgtacgtccaatttagacctctttgaaaaacctaaacgtaagcatcatcgaactcatccgcaagctaaaaggtgcttagggcctaatattgctcaacgacctcaaactgcggaccaacggtccgaaattggccattgggaactggatacagttcagggacagaaaaatggtaatgacagtgttgtactagtaatgactgatcgcctttcacgagttaatatcacgagtaaaattgctggtaaaactgcgcatgcagtaaatcagttctttacaaatttgcgccagaaaatgggcacagatgcttactatcgcatctttaagacaataacctctgacaacggttcagaatttagtgagttaacacaagttcacgatcatgttttctatgctgatccggattccccttgggaacgtggatccaatgagatcaataaccggtttctccgcaaggagattaccaaaggtgaagctataaataactatagtagtgctcagatcatagcgactaatgattggatgaatcactatccacgagctatatttaatggacattcgtcaatggacatctatcgtaaggccttctaccaagagatatcacagctccaccaaccaataatcaattggtcagtattatttatttgagtccagtggctaacttattcttgaaatttagggtatgtattccattgggatttttgattggtttcttgaatgagcgatggggtaattacccgttaacgattgaacaagtgctgacgcaagtaaggttgaaagggcaattaaattatcataattggtggaagtcttttattcttggcttattggccctcggagcaggagggaacatcgggccggaagcttctacaacagtcttaactagcagcatgattaattggcttggtgaccgtatgcgctgggcaacttcaatgcgccagaaagtttctctttggtacggtaaaatgcaaacgcaagatttagcccgtgctcctagattcagtcagctttttaaaaataaatatcaacgagtctttgttatttcaggattagttggaattggaatagtaggcgcggcgattgtttttaagctttttcctgaagaaggtgtttttgggatgcatcaccggatcattaattgggagtggatcaatttattaacgagtattccaacgattatcattgggattgcttttgggtggctgtttgttcacttagaaaattgggctgcactgataattaatgcaaaaataagtaagatttggcaaggtgggatttttgggttaattttagcgatcagctcgttgattacaagcgatatcttattttctggtgagtttagaattgttccttttacccacgaagccttcaatcattcaatcatcttcctattagttatagcactcgtaaaagccgtaatgagtaatctgggttttgcaatgggatggcggggaggaactattttcccggctatcttttcgagtgtcgcggtaggaactgcctgtgcgatgatgttgcctggagacgtacggataaatgcaattgttgtaatcgcggcaagccttacctttattttagaaaaaccgttattaacaattatcctgctgttattattggtaccgattgaactagcgccggttataattgtagttgcatttttagtaggaaggattattaaactttttcctgctagtgaatagagaatctttaatatcttttgtgtaataaagaagattgagtacttgctaagcgtgaaaaattatttaaatttcgttttattaatattttgttgtttatatgagaaaagtcctgtatctttattaaaaacaattagagaatggggcgataatgtgtttagcagaattggtcaattaatattcgataatgaagctgttgcaaagacttctgattttacaatgggtcttgagattgaaatgcaacgagtagacgaagatggcaacctaagccttgagccatatccgtcagcgattggggatgagaagactaatccatggattaccaatgattttttagaaacaatggctgaaatggtaactccttctgcccaacatgctcttgatgcaatgcattatttgtatgttatcaataatacattgcgatcagctcttgctcccggcgagttattatggccgttatccatgcccccacgacttcctaaagataagactaaattacggttagctaaaatgggaccgaaaaaagaagcttatttgaaggaatgggcaaaacgtcatgggtactcgcaaggaacgccctgtggagcgcatattaatttgagtattgatcagcacattattgagctagtccttaatgctttcccggaacgctttaatagtaagcgtgaagtgcggaattatttatatactatcttggcacaaggttttgtccgatatcgatggcttcttacgtatctttatggtgcaagcccaattgttgaagaaaattattttgaaccgggaaaagagttgcctcatccgattcggagtgtgcggcaaagtcaatacggttttgggaccaaatttaccggtgattttactaatctcgatcgttacattgcacggattgaagaaggagttaaagcagggatcttaacatcggattacgaatttcatggtccggtgaggttcaaaggaaacacggatttaaaaaagttgcctgaacatggaattgagtatttagaattacgaatgctcgatttagatcctagcagttcagtaggagttcgaactggtacactaagatttattcgtttattagcaagttacttgatcatgcagccgccattaaaagaaaacgaagtagaagaaatgttggtgactgccgataaaatgaatgaagttgtagccgaggaaaatccccaagcaacttgtagatatcaggccaaagctcgtgctgtcctcaaaagtttagagcggtatgccaatcaaatccaactcggtccagaatattccgaagttctggaagacttagaagatcgggtcgaaaatccgctaactaccccgagtgctaaactcttaaactatgtaaagaatggttcactcaccgagtatgcgttgcgtcgtgccaaacgttaccaacaagcggcacaggaaacaatccatccttttaaagggtttgaagatggacgaatctatactgctgatgagcttcgaaaagaattaacattgtaaccttttcaaggagaagctagctccagtaagcaataataggcctccaacgttcgattttaccgggcattggaggcctattattctatgtttttttctgaaagtaacttagcttatgtcacagccctccactatttatttagccgcttttttcgctctagtaattaagtcagcaaaaatagcgcgcgaataatcgtaatgtttaaacatgttttctggatgccattgaactgctaaaatttgatcagagttaatggtttccacggcttctggtacctgatcatcagcccatgccgttacatgaagtggttcagcaatctgatttagtgattgatgatgacgtgaattaacatatggtctgggtcctactaagttaaataatcgacttgccttgtctgtattaacgtggtgggaaggaaaatttcctggggcatcttgggaatgcttaagggtttgatggggattttccgaaaggtcttggtataaagtcccgccaagcgcaacatttaatacctgcattccacgacagatccccatcattggttttccagcattaaatgcagctgtagcaagactaatttcaaattgatctcgtttaagatatgtgggacctaatttttgatgcggctcttcgttgaaaaaggttggatcgacatcacttcctccagcaaagataatcccatcaaaaagatcaaggtaggatggtgctagtgaagcagcaacactaggaagaataacgggtaatcctcctgacttgataatggcttcgattaatgggcgaggtgcgaaggcagcatttcgctcgttaatgatgtttgtagcttcagttaatgtatctgcaggaatagcaattcgtggatgcatataacccctcctcatttagttctcatgatattataatcaaagcataattcatttggaatagcaatcaatatttttaataaaaaaagatataatagaagaagaaagaaggaatgtaaagatgcttgaattaactaatattaactcaacgttcaacttaaataatgaggtcaagattccctgtgtgggatatggtacatttaggactccggcagatgtagctgaacaggccgtgaaagaagcaattgaaactggttatcgacacattgatactgcggctgtttacggaaacgaagaagcagtaggcaaggggattaaggattcgggaattaagcgtgaagacctttttgtgactagcaagttatggaatactaatcgtggctatgaacaaacgaagaaggcttttcaagagacgcttgatcgtttgcagatggattatttagacctttacttaattcactggcccgccaatgaaaagcagtttggagatgatgctgccaagattaatgctgaaacgtggcgcgcaatggaagacctttacaatgaaggtaaaattcgggcaattggggtaagcaattttatgcctcaccatattgcggaattaatgaaaacggccaaagtagcgccagcagttgatcaaattgaggttcatccgggttggccacatacggaagaaattaaatacttacaagcacacaatatcttagttgaggcatgggctcctttaggtggtcaaggtgctaaagtattaactaatccaacaatgattcaaatcgctgataagtatcaaaagacgccagcgcaagtctgtttacgttggattctccaacaggggattcttccattaccgaagtctgtccataaagaacggatgataagtaaccaaaatatatttgatttcgaattaactgatgaggatatgcgcaagattaatttattgccaaatcttggcggtcaatgtgctgatccagatgaggttgatttttaacgataaaaaatatgaaattgatgcagtagtattgggtatccagtcaaataaaaatagtatgctaaaaagtctcgaaccttcacggaagaggcttttttgatataatttcttttagctaataatgaggagaatttgaaaatgaaaaatgcttatcgcgcttttcgccaatactcttgccagttcaggaaaaattggcttgaatatttaatattatttggcggtcttgatattttaaaccagtttctggtaattccattttttcgctggataactacctttgtcctgcaggcaggagaaattccgtttatttcatatcaaaatattgtaattattctgacccatcatccattagttgtagtgatccttttaattgaattaatatgcctaatggtaattatctatggcgaatttatgctcttgttgaagagcttttgtggaattggcttgccagagtttagctggcgccgaatgtttaggcaaacaaaagaaactttatcgttactaaattttggatcgttaattctattattaggttactttttacttattattccatttgcggatatcatctttcgaactcccctgctggcgaaaattcaagttcctcagtttattgttgattatcttacccgtaatgcatggcttattggtggattgaccttgttctatcttttgatgacaatgatcggtattcgtttaatattgacaatgccgttaatggcttatcaacatttacggttaagagctgctatgtctcaaagctggcaaatgacaagtaagctaagatggttgaagtttttaattcaaattgtgctgatgacaataattgtaggtagtataacggttgttttttacctcatgatttacattctccaggttgttttggatttattacccgggaaattatctttgattactgctatctttaacttgtcgatcttacagcttggtggggaagtactagcagtatgggcaggaacaattatcttactggtagtcgttaaccccttaactagcattagtgaactagcgacaactcctgaacatccatcacgaggattgctaacttcctttatgcttgtcttccttgtaatcggcttggcgactcttgcaaataatactttttacatgatgggaacggggattaaacgcccaataactatctctcatcggggagttactgaaaaaaacggggtgcaaaatactattccagcaatggaaaaaacaagtaaacttaagcctgattatattgaaatggatttgcatgaaacaaaggatcaccagtttgttgtgatgcacgatgaaaatcttaaagacctaacaggagtaaataaaacacctcatgaactaacattgaagcaattaacacgactaacagcacgcgaaaatggctatcatgctaaggttgcgagttttgatcaatatttagcagcggctgagaaatatcatcagaaacttctgattgagataaaaacaacaccccatgattcaaaacagatgctccagaattttaatcgccggtatgggaaaaggattttgcaagatcatgaccaagttcactcgctcgattacagtgctgtgactaagctaaaaaatattaatccgcggttaacagttttgtatattcaaccctataatttgggtaatccccagggagttgctgacggtttttcgatggaatattcaacattaaatcaggacttcattactcaagcccagtggcaacataaaccggtatatgcatggacggttaatgacaccgatttaatgaaacagactatgtataaccacgctaatgggataattaccgataatttaggggaattaaatgcggcaataaaagattttactggaaagcagagttatgctaatcgaattctaaattatattattgtcgttcctacaagtgggggaattgaaccgtaaaaaaatactcgagaacagataagccgttaaggcgatcagttctcgagtatttttatccaacgtgatgcttcttcaattgcctaataacaattaacgccactattccaccgatcattccttggataaagtttgaacctaaacttaaaaaaccagtaattacatggtacataacggtattgcagataaagtagattgcaatcattacgattgttccgaccaagattgcggtccatttgccccaggtggtgttgccatattttttataaatccagccactgataaatccttctaaaccatgagcggcaaaggaaaataaggcatcttgggggaagccggaaataaggtcaaggaacattccgccaaagccaccaacaattgtccctgctcctggtcctaaaagcatggcagcaatgaatacaccagcatcacataagttgacgttaccatgtgtccatggaatagggataagaaagaagcggccgaggacaagagttaatgctaataacattgcggcaataattgagcggcgtaaccgaaaagtagattccatattaaaactcctaacatagtcaattgtgagtaattttacaataattttcaaaaaatttcagagaaaaaatgtgtcgttatttatctatcgatacaaacaaaaattaacttaacatcttatatcatagtaattacattgaaatattatgtaataaaactgataattgattttcaactgataatcaatattcctattttatatattgattaaatgaaaataatgcgtataataaattgtgaaaatcagaacatgatatgaggtgtgtgttatgaaggttattattgttggttgtacacatgcgggaacaattactgccactcaaattttacagaatcatccagaaacagaagtcacaatttatgaacggaatgataacgtttcattcctctcatgtgggattgcggtttacttgagcggtgatgttggtgatccagatgcgatgttttattcgagccctgaacaacttgctgccatgggtgcaacagttcatatgcaacataatgtaactgatattgaccctaagactaagacagtcacagtgacagaccttgtgacaggcgaaacaaagaccgaccattatgataagttagttgatactactggttcttggccagtaattccaccaattgaaggtgtagatggccctcatgtttatttgtgcaagaattaccatcatgctaaagaattatttaacgttgctaaagatgcgcaacgaattgttgtgattggtggaggttatattggggttgaattagtagaagcttacactcgtcaaaataaggacgttacattgattgatgggtctccacggatgcttcataaatactttgaccgcgagtatacggatcggattcaacaggaatttgtagatcacggcgcccactttgcttttgaccaacgcgtaactggatttgaaaaccacaaaaatggtgtaaccgttaagacggataagggcaactacgaggcagatattgctatcctctgtgttggcttccgtcctaatactgatctcttaaaaggtaaagttaagatgcatgataatggggcaatcattacaaacgaatacatgcaatcatctgatccagatatttacgctgccggagattcaacggctgttcactataacccaactggcaaggatgcatacattccattagctactaacgctattcggcaaggaacaattgttggaacaaatctctttggtaatacaatgcacgatatgggaacccaatctagttctggcttaaacttatatggaacaacgatggtatcatctggcttaactttggagaatgccaaagaagcgggctttgatgcagctgcggtgacagttgaagacaactaccgtccagaatttatgccgacaacaactcctgtattaatgacattggtgtgggataagaagactcggcaaattcttggtggacagtttatgagtaagcatgatgtttctcaatctgctaacattatttccttatgtatccaggataagcacacgattgattatttagcatttgttgatatgcttttccaaccacactttgatcgtccatttaactatgtaaatattcttggccaagcggcggtaaagaaacaagctgaattagaaaaataataactaaaaaggttagaagagaaaaagttttcttctaaccttcttttttacgcttatttttaaaaatcgccgttcatgattgaatcttttacaatcatataatcgaccttccgaatagcttcaaggtcacgaccacccgagtaagagatggatgattgtaagtcttcctgcatttcggttaaagtgtctttgatggagccacggtaaggaacgagcatctgctttccttcaacatttcgataagcacctttttgaacctcagatgcagaaccccaatattgtttgtattgttttccatcaatgttgatgacatgtcctggtgattcgaggtgaccggcaagcattgagccaatcatcaccattgaagcgccaaaacggacagacttagcaatgtccccattatgtctaataccgccgtcagcgatgattggtttccgcgcggctttagcacaccaacgaatagcggataattgccaaccgccagtaccgaaaccagtctttagcttagtgatgcaggctttaccgggaccaaccccaaccttagtagcatccgccccagcattttcaaggtcgcgaacagcttcgggagttgcaacgttccccgcggttacaaaagtgtcgggaagtttttctttgatgtattggatcattttgatcacaaaatcagaatgaccatgggcaacatcaattgtaatatactctggatttaattgttcggattttagttgatcaataaaattatactcatcatccttaatcccgaccgaaatcgaagcaaataatcctttttcgtgcatcattttaacgaaagctgctcgtgtctctggattaaagcggtgcatcacgtaataatagtcattttggacaagccaaattgctaaatcttcatcgatgacgctctccatatttgcaggtacaacagggatcttgaatgtgtgagggccaaacttgacgcttgtatctgcatccttacggcttttgatcacacatttatttgggaccaactgaatatcatcataatcgaatgttttcattagggcagctcctttttaaaaatttaccgtaattattatgcgctaaaatatatgaagcgtcaatgaaaatagcgtacatttgctgagtaatatcaaaaaatagttcgataaactgttgacgacaatgaattaatccggtaaaatagcgaagtaaaaacgttaattttagaaagtataactatgaggtgaaaataaatgtcatcagttgttattgttggtagtcaatggggcgatgaaggaaagggtaagatgaccgattacctaagccaagaagcggacgttgttgttcgttcacaaggtggtaataatgcaggtcacacaattgcatttgatggtaagaagtttgccctccgtctagtgccatctgggatttttgctaaagacaagttagcggtgattggtaatggagtggttattaatccacctgcattattaaaggaattgcattatcttcaagacaacgggattgacatttcaggtttacggatttctagtcgttcacacatcaccttcccataccatattcttcttgataaatgtcaagaagaggcaaagggtgatcacaaggtgggaacgaccaagaatgggatcggtcctacctacatggataaggtttctcgtgttggtatccggatgtgtgacttacttgagaaagacacctttaaggaaaagcttgaacgtaacctcgctgaaaagaacgaattattcactaagttataccatgttgacccaattaactttgacgatatttttgaaagttactacgaatatggtcaagaattaaagcaatacgttactgatacagctcaaattgtcaatgatgcccttgatcaagataagaaggtcctctttgaaggtgcacaaggggttatgcttgatgttgaccaaggaacatatccatacgttactgcttctaacccaattgcggggggagtatgtactggtgttggcgttggtcctaacaagattgaaaccgttgttggaatttgcaaggcttactctacacgggttggtgctggtccattcccaaccgaattaactgatgagattggtgatcaaattcgtgaaacaggtcatgaatacggaacggttacgggtcggccacggcgcgttggttggtttgatagtgtcgcaatgcgtcatgcacggcgggtttcaggaattagttgtcttagccttaacttgcttgatgttttgactggcttgaagactgttaagatctgtacttcatacaaacttgatggtaagcaaattgattactacccagctagtttgaaggaacttgaacgctgtgaaccagtttatgaagaacttccaggatgggatgaagatattactggtgcaaagaagtttgaagacttaccaattaatgcacaaaactacttgaagcgggtaagtgaattatcagaatcaccacttgcaactgtttccgttggtgctgatcggattcaaacgattatcgttaaggatccgtgggaattagcacataaataaatagatgagagcttctaatgtttgaataatctttaagcattggaagctttttatttctcttggctcccctatggtataatcaaggcaaatacacgttataggaggcaagatgatgacacagccaacactaacagtagaaaaacattatttaaattggccacttaaccgtcctttaaatcaagctgacataatgcatgagttgggtgtgcatgcatccgatgaaaatggccaagatttaacgagtaaggtgatgatgaacctaactcaagtggatgttaacaaagtaggagaataccctgtgatgttaaatgtaatggataataacggacaaagtgcccaggcaagcattaccctaaatattcaaccgatgcggacacagaatgcacctaaggaaactgcaacgtccccaaagtcaagacggggatggttatgggttattatcgtaatcgtggttatcttatgtgcatggtgggcgatcagctctcataaccgacaagcggctaatcaagcggcaactgatagtcagcagagcagtcaaataagcaacaattcaagcagtatcagcgatttaacaaaagataatcaacgtcttgctagccaagttgcagaacttaaaggggcaacccaacaatatcagaaagaccatgatcaacaagcattagaaagccgacttgataagatccaaagtcaaatccaagacttgcaaaatcaagttcaaagtaacagcgtgaagcaagatttaaaccaagttaatgaaacagttaatgaagtacgggaaaacccagataatgggacgaaaattgtcaacaatctaaagaataaagacgactttcaagaaatttggggaaatattagccaagaagtccagaagtggttagacgagtttgctaattagtgagtttgacagcgacaagatagacccttaaaatggtaataataattagcgaggttccccgttaaattgttagggaaagactcaagtaaatgctggatccttccttagattagcggagggccttattcttttgaaagattttaaattaattaaggaagtgacatgatggctcatgagatcttagatggctcaagtatgcaacgtgcattgacccggattacttatgagattatcgaacaaaataagggtgtcgataacttagtatttgttggaattaagacgcgggggtatatttagcaaagcgcctcgccaagcgactaaatcagttggaaaatgtagaaattcctgtggcagcacttgacgtctctctttatcgtgatgatcgtcatgtaccagattatactcaagaaccaaccgtaaaaactgatcaattagatattgatattactaataaacatgttattttggttgatgatgtactcttcactggacggacagttcgggcggccttagatgccttaatggatatggggcggccaaaccgaatttcactagcggttcttgtcgatcggggacaccgtgaattaccaattcggccagattttgttggaaagaatatcccaacagcaatgaatgaaactgttcatgtagcagttgaagaatatgatggccatgaagatgtaacaatcgagcataattaaaagggaaacgagacaaaagcccctgtaagcaataaagacctctatcgttcggttttaccgatgatggaggtctttgttatactgcactatttacttcttatgggcgtaacctaatccttttatcttagctttcgccaccaatccaccgttgaatgctcattaaatacccgggtaccaaattttttctgaaaccatcggacttgtttgggcgtaaatccccgaaatactaatggtaattttttccagtgagaataaagagcatagagaagaaggatgtattgttctttactaatatcatctactggaatctcactaaccatggtcatcgaaatacctgttcccagagcagggaatgtatcgagactaattttgtagatgggattattactgatgttagtggtaaatactattaatgcttgtttttgtcgcggacgataaacttcttcaattcgcttattaatcttgtgaacttggcgtttagttggattgagaattatattacgcatatgaaacctctggtcgaacatttgtttagagaacagtatatcatacttagaaacagaataaatcatgtaagtcttttactgatataattttatttattctttccgttgtaattacactattcttattaatgcggtatgattggattagtgagttcagtattaatcgtgcaggacatctaatgcaaaactggtttgcaatttttggaatggtctttggtttcgtgattttaccgttaattttattctggttaacgcgtcgtgagcgagctgaaaatgacgaacgagtaaaataggagaatagaaaaaacgctcaatgactgcacaaatcattgaacgtattattttagggaataatagtagccgatatcgcacattatctgctactagtaaatgttaagtctaattgaggcgaataactaaaaaacaactattggcaccaccctagaagaaagaacaatttaactttgggagtttattaggatttttgtccttattaaaatgagaaaaagttaaggacactttagcagtcattaagtaataaaattgatctcttcacgaattgcttttgatgttaaagcttcaattcgatgatattttaccaagtaatttatcaatagttaatagttttacgagattatgcactcactgtgtacaagtgataccaagaatacactttgttctaacaagggtattattttactatatttttactaatcgtttatattaagataatatagtttggagtttatataggagaaaaaagatggatattcgtaaaattaatatgttaaatggaattaaggaaggatttattactgttttagatactaaaaaattatcagaatgtactactaatgatattgtaaatagcgctgaaattagtaaaaaactttctacaactattaccaaaataaacaagatcttctccatgaaattgaaaatgatctattgggaggtctaaaagaagctctcgtaattgatcgggaggagctaaaagatgtcaagcatttaccaagtgcagacgaaattaaggaattagcagaagtggcatttaatcatacgttggctttttgtaatgaaaataagcatgcgttgtcaaatttgctttcctcaaatggagatatgcagttttatcaaatgattattgaagtagcaaataatgaatttgatgcgcgagttccatatttgtttggggatataaatattaaagaagctaatgtaaaatcgtcattgccattctcatttattaaaaccctctatatcaatacaattgttaatttgttaatgctttggggtgccgcaccagactctttaagcattaatgaaattaagtcaattgcaggcttgattcaaacaaaatcaccagttgaattgattcaaatttataaatcatatttaaactagaaaatgaggagccgaaaattttttctcggtctcctcatttttattatcaaaaattctttttaaattaattgcccttccaataacgtgcccgggtaagcagttcccgtgaacgctggtcagctggtcgataacccttagtaaataggtgtcggaagtacatcatattatagaaaaagccaaagaaaacagaaggccatgggaattggaacagggcattaagtccaaagaaaagggctaccaaagcataatcgagggttaatacaatcattaaaatgaaattatagtaatccgcgcgaaaaagagctggcagtggcccgaaccaaagagttgtccaagaaaagccgactttggcgattcggatatcccctggtcattaacgattttagcgtaatttggtgggagggggagattgtttaagttaaacggattttggttatcattattgttattaccaaatgggttttgcatatctcgtccacttctttctataaataataatattaacacattgagtgagggataggaaacgtctctatcaggctttcaaggaatgttaacaattatatggtaaactcaaagcgataaccatgaaagggggaatcaaggatgctttttttcctaaacgataatattcaacgaaacaaatcaggaattgagcatgcgcaaattaagcgtctgcatctgtttgaaaaatatcatcaaccagctaagattgttacccggcaatattcgaatgaattacacttggtaacagcagaagcagggattgatgatcgtaactttattaacttgtttgattattttcaggaggcttgtgaggtcccgcaaaagaatattcggattaaagatattccggttaacccccattgggagcacaaggctgatgggattaattataattattatcaaaatggcaaacgtattctctatattcgtcggcgcagtgatactgatcggcgggtaattaatattcaatattttgatcattatggaaagcttctcaaagttagttggtttgacagccgcggttttatctcggtcgaacaactttatgactgggatggaaaaatggcaacggaaaactattaccgtccagatggaaccttagcaatccagctagcccaccagcatgataagcggggaagggaaattaaaacttaccatctttttaattaccatggtcgtgattatcaattcagtggctttgaccagttaacccggtttttcctcgatgagttggtcactgacaagcaaatctgtggtgaaggtccggttggctttgtcgttgaccgagtttatgaactaggctgggcagttctgcacatgaagcaccgggtttttcgggttcttcaactgcataatgaccatgttaataatcctgatgatatgcttcattctacccttaattataactatgattggggacttaagcacctccaagattgggatggggtcattgccttaactccgcaacaacaagaagatcttcaagatcggtttggcaagtttggtgtaaagatctaccggattcctggtccgattgttcctgcggcagttattgataagcatcatgttccttttaaaaagcgaacgaaaaaacaagttgtcatggttgctcgcttgtctcccgaaaaacagcaagatcacctattgaaagcatggccacaagtactagccgctgttccagatgccaagctcgatttttggggatacgctaatgatgattttgataagacgctcaataaaattgtcaaagaggaagcgattaatagttctgtgaccttccatgggtatacagataacgtcaattcggtttacgaagatgcgcaattactcattttgccaagtcgggctgaagggttaccactatctttagtggaagctcagtcccatgggttgccgattattgctaatgacataaaatatggtccttcagatgtcgttattgatcaacaggatggattgctgaccaagaacggtgatattgatggacttgctcaagcgatcattcgcttattgcgagatcaagagcaattagcgcagatgagtgaaaatgcttatgctgatagtgagcgttattctgaaccaaacgtgatgaagttatggaatgaattggttgctgacatgaaggaaaagggggaagagtaaagtgtacttttttgtaaaccaatacttattaagtagcaactccagtgttgaacatgctgaattaaaacgactagccctatttaaaaagcatggtggagaagctaaattggtgacccgtgacttcgacctcgttcttcatgataccatcaaaaaatttggtttaactaacgaccaaattgttaatatgtatgacttttttgcaaacacgactgattaccaaggcaaaaagctccatactgaggatttacctttaccaattgactatcaagtaggaactggaaataactatcgcgaagtaaaagatggtgaccgccttgtttgcgaagttcactttgcggctggaacgattgggcaagttaaccatgttgattactttgatcttgctggtaatatgactcttcgccaacaatatgatattcgtggttttaaggcagctgacgaattttttggtgaagatggacaggaatactatgcgcgttattaccgccccaatggagaagcgtatcttgaacggtattttgtaaaatcggttgaaaataccccaattaattcgctgaatgtcttacgtaattatcaggggcaagatcgcttctttgattctttagaagacctctttattttctttttggatgaattgaataaggcaaatggtgaggataatgtgtttattgctgaccgaccagctgttgcgattaaaccggttcaatcaatgatgacaaaagcaaagaaatttttgtggcttccgatgaaccaggttaacgatggtcagaacttaataaatggtcccttaaatccgatgttgcaaggtcctgttactacggatgcggacaagtgggatggtgtaatcgtcatgactgctaaacaagcggagattctccagcaacaaattcacaatgctgtaccaatctatgtaattaatgggacccccgttcttgctaactatgcgcggattaatgaagctgatcggacaccgggtcaattgatttacgttggaagattggcagaagataagcaaactagtcaactaatcaatatgtttgcgcagattcatcagcaagtatctgaaagtaagctaactttctatgggtatggcactggtgaagatatggataactataaaaaacaggttaaaagccttggattagatgggtcaattgagtttgctggttaccagatatcattagatgaggcatatgatcaagctcaattatttgttgatgcaagtcgaatcgatgcacagccattagcgatgggcgaggccttaaaccatggggtaccagttgtttcctatgattacctttatggaccacgtgaaatggtaatttcaggtaaaaatggtgagatcattcctttaaataaccagggacagtttattcaaaccgtcgtcaaattattacaagaccgagatgaactgcaaagcttaagtactggtgcctatgacaatctagatgaattggtagaagaaaaaacttggaagcaatggcaacaactatcagctatttagtcaaaattggttataatatattcagaagacgaaaagcagaaaataatcaaatgtttttgaagcctttggtcgttatcctttgataatctaaagacggaaaatgagggcggaatgatggataattatcaagcaatgaatttttactatggacttcttaatttgcgtgccggtttttttaaggctgacttatgcgaaatactaatggcgatcgcacagagcgtacctgataaaaatcaacaatcagcaacggcataccatactgtagaagagaatttgagccaagaccataagcaattaaatcgtgatcaagttgcatttgggtcattttatgaagatggtcatattttacataatgtcaaaattaatacccaatcagactttttcctcgatccgacccgggaagatactgtcaagtggcatgttagttttacggttgctaaaaatgtccgtccggccgatcaatttattgttcaactatcgccaaatttgatggttgcgcctaatggtcatcctgaaaagccaattcctgattttagtgatcaaaatgggactgttattgcaatgggagcttatgaccaggataagcacgaacttgtctatgcttttaccaattacgtaaccgagcatcgacaaataattggtgaattagagggagaattagcagttgatcctctaacgactccagagaacgaatttggcttggaatgttttataagtgttgatgattaccgaaaagactttacgattgatatcgactatccagatcttgctaacgacatgtttctcgggatttctagccggatgatgcattttgataaggatcagcagctttttgaggacattatctatgttaatccagcacaaaaagaccttaatcatgcctatattgtctttaatacgagtgatctagtggaagaattatctaatgccatcgtcaaaccgtcaacaatgcggattgagatttatcgtaattcacggggattaaaattacctcaatcatatggggtaaactttcagcgactaagggatattactaatcgattcccggtagtggaaggcgatcaccttgtcgagacaccttatacaatgtcctttgctgataacaagatgcgattgaattttggcgccgatcacacgaatgattcctatattattagggtaattggccaatataatggtgaacttgatggaacagtacgattgcgggctcgtttatttgggatggaccagcaaaatgtttatatgagtaattctactgctgcaacagctgctggaacttcaatgatcgcaagggggcatgctatttctaaggagaagttagcggaggagacagcggacacaacagaagatttgaagcaagacgaacattttgtcaatgtggaagaacctcttgaatctacagcagttgaagaagtgcgagaagaagctgatattccatctgcttctgatggtcaagaacaatttcctagttctcaagcggaagaagatgaaacgccaatcgaagaaaagcaggcggaagctcctgcagttagtggagcagtcggcggggatgaattatcaatctcctttgacgtcactcctcaaacggcaccggcagaggttatagaagaagctgaatcttcagatgacaaagaggagcttactatatctgaagaatccgcagtgtctgagtctgctgttgaaattaaagttagtgaagaggagacaagcgcagcacccctaccaatgccgggacgacgaccaccgcgccggcacagtcgttttcaaaatacaatccggtcgaatcattcgttgcgtcatttgcggagattctaatagaaaaaataaagtgtcaggagagattatcctggcattttatttttaccgaaatgtaatcgcttacataaaatgcttgcaattaaaaataaaggtgttaacatttaattgaagccaagtaaacgtttacattaatggataaagggaaaagtgtagtagttttatggagagaggttttattttatggaaaataatcattggtggaataaatcagttgtttatcaaatttatccaaaaagttttcaagataccaatcatgatggtgtcggtgaccttcgtggaataattgatcgtctcgattacattaaggaattaggcgtcgatgtcatttggttgaaccccatttataagtcaccacaagttgataatggttatgatatcagcaactatgaagcaattaacccgactcttggcaacatggatgattttcaagaattgatcgattgcgttcatgaacgtggaatgaaattggtcatggacttagtagttaaccatacttctgaccaacatgactggtttaaggaatcacgaaagggcaaagacaatccatatcgtgattattatatttggcgtgacggtaagaagggtgaagagccaaataattggggttcctacttctctggcgctgcttggaaatatgatgatgaatccggccaatattaccttcatctttttgctccagaacaaccagacctaaattgggaaaatccgaaagttcggcactctgtttatgacatgatgaactggtgggctgccaagggtgtcgatggttttcggatggacgttattaacctaatttctaagccggatggattgcctgatgctaacaagaacgaagacgagaaatacgccaatgttgaaccgttagtatcaaatggtcatcgcattcatgaattcttacaagaaatgaataagaatgttatgagtaagcataagatggtgacagttggtgaaacaccgggcgctacaccggaagatgccgagaagtatgccagtcttgataataaagaattaaatatgattttccaatttgaacatatgggccttgatagtaatcctaatccagcccttggcaagtgggatgatcgcaagacgacccttaaagacttacgggcaaacttaacgaagtggcaagaaaaattgtatggtaaggcatggaattcactttattggaacaaccatgatcagccacgcgttgtatcacgttttggtaatgatcagacggaagattaccgggttaaatctgccaagatgttagcgactatgacccacatgatgcaaggaacaccatatatctatgaaggggaagaaattggcatgactaacgcctatttcccaaagcttgaagattacgtcgaccttgaatcgattaatgcctatcaccaacttgttgatgaccaacatttacttgatggcaagacaatgatgaagtacattgcgatccattcacgtgataatgcgcggacaccaatgcaatgggatgatagcgaatatgcaggattttccgaccataccccatggaaaaaggttaatccaaattataagcagattaatgtcaaaaacgcattagctgataagaattcgattttctattactatcaaaagttgattgaactacgacacacgatgccagtaattactaatggaaagtatgcattagttcctggtaatgaagatgatgaacaggtctttgcatatactcggcaagatgatgacactactttgttggtaatcttgaactatactgatgagactgttaaccgccattataatgtgccagctgatgcgaagttactaattagcaattatgaggatgatcaaaatggcactatccggccatacgaagctaaggtttatcaatactagagtggggatgaataatcatggataaatcacgttcgaattcgaaacaaaaagttgaaacgaagcaggttgatctggatacagggatgccagatttgccaaagaaagagctatttgcgattacatttgcttttctgggaataaacatggctttctcactgcagagttcccagatgagtcggatttgtcaaacgattggggcaaatcctaacaatctaggtttcttcttcatttttccaccattgatggggatgattgtacaaccgattatgggaaagatgtcagatcggacatggaatcgctttggtcgtcggttgccctacctattatttgggactccaattgcggcattagttttgatcatgctaccgttctccggttcacttggcttcggctatggttcaatggctgcgatgatttatgctgcggcagcggtatgtttgatggatttatttagtaatatttgtatgcagccatcacggatgattgttggtgacatggttaataacaagcagaagaactttgcttggtcatggcaacaggtcttttctaatggtgggggaattttagcaacgatcttaccatttatctttacgatgttcggaatgtccaatactgcaaaacgaggggtagtgccaaataccgttatctggtcatacctttgtgcagcggcggttctcctgtttactggactatggacggtctttaatgttaaggaatatgatccggaaacatatgcaaaataccaccacattgatcccgaagaacaaaataagtcagtcagcctttggaaattaatcaagacggcaccgcgcgctttctgggaaatcaacttggttcaattgtttagctggtttgcgatcatgtacgtttggacatacacgactggaacctgtgctcgtaatatttggcatacgtctgatgttacttctgctggttatcaagctgccggtaactggtatgggattttaactgctgtttatagtattgctggtattgtttggggattaatttatgcccatgccaaggctggctcacggaagaggtggtacacatttgggatgatcgtcggtggtttagggttagtctggatgacctttgtcacaactaagactacttcaatcattgcaatgatcatgtttggaattggtaacttcagtatcaacacgattccatttaccctcctcacttcatctttaaacggtaaaaacgaaggtgcctacctcggactcttcaacgttggaatctgtgtaccgcaaattgttgcatcgttatgtagcttcttcctcttcccacttgttggtcacaatcaaccaatgatgcttttgcttggtggcatctccctccttattggggctttagctgtccaagcaattcatgaaggggtaactgttaaagaagtgtagcgctaattaaatctctccttaatataaaatagttaaaataaaagcgggactggaaatttatccggtctcgcttttgcaatctatttaattgtgatggcttccaaagattgatcttctttaacgtgcagcaacgcattgactgtatcaagtgaagtcatgaggggaacattttgcgcgattgtactttggcggatctgaaagccaagtgaatcttgttcataatcatggcgcatagtgttgataacaagatcgatttgcccggcttttaagagtcggttgagttcatcaatgttagatattttttgatggacgtgaatgccgttatccttaaagtgcgatgctgtttgtggggtagtgaaaatttggtagccaatctgagcgaaccgttttgctagtgggagaatgtcttcttcatccccattttcaatcgtaaagagaattttgccattgttagggacttgaacgtgtgctccagaaaaggctttatgaagtgctttttcataggtggtatctgtccccatcacttcgcctgtcgatttcatttctggactgagataagaatcaacgttcgctaacttgttaaaactaaagacaggagctttaacatgaatggtttgtggttctggataaagaccgttagtaaaaccttgatcagcaagtgactggccaaggataactctggtagcaacttgggccatttcgattcccgtaatcttgctgaggaatggcactgttcgactagctcgcggattaacttcaaggatgtacacttcacgattatgaacaataaattggatgttcatgatgccaatacatttaagagcaactgctaatttttcggtagcagtaacgatttgttgtttaatgtcatcatcaaaatgttgtgggggataaactgccattgaatctcccgagtgaacgcccgcatgttcaatatgttccataattccagggataaggacgtcttttccatcgcaaattgcgtctacttcacattcccgtccttcaaggtaggcatcgattaaaatagggtgatcagcagtaatggaggcgttttgttgaaggtattgttgcagttcttcttgattataaacagtctccatggccttaccaccgagaacataacttggacgaacaagaacgggatagccgatttttttagccgctttgataacggcagagtgagtagttgcggttaaaccgattggctgcttaagatttagatcagtgataactttatcgaatacttctcgatcttcagcagcatcaaggtcgtcaacggttgttccaagaatattaaccccatttttagcaataccttctgctaaattaatcgctgtttgtccaccaaattgcacgatcacgcctactggttgttcgagatcaatcacgtttaggacatcttcaagcgtgaggggctcgaaatagagtttatctgagaccgagaaatctgtcgaaacagtttctggatttgaattgatgacaattgcttcataaccagcccgttgaattgccttaacgctatgaacggtcgcatagtcaaactcaactccttgaccgatccggattggccctgaaccaaggacaaggatagatggcttctttgtccgttggctttcattttcatggtcatatgcgctgtagaaataaggggttgaagaagtaaattcagcagcacaggtatcgatcatcttatatacggggagaatttcattctgttttcggaatttccgaacttcttgtggggaagtatgccaaaggcgggcaattgttacatcgctaaagccatattttttgctgattatcagtgtttctgcatcaaatggcttggtactaagatcgtcttcaagttccaccaagtgtttgacgatatcgaggaaatagggggaaatcttagttaagtcatgagtttgcttaagggaatatccacgccgaaatgcttctgctaaataaaataaccgatcatcttggggataacgtaacttcttttcaagcatatctgttggcgcatgatgagcttctgctgaaaagaggtctttttcatcaatttcgagtgaacgaacagccttatggagagcttcctcaactgtccgaccaattgccattacttctcccgtggctttcatctggctgcccaggtgtcgatcagcctgagtaaacttatcaaacggccagcggggaattttgcagacaacatagtcaagtgccggttcaaattcagcaaaagttgtcttggtaacgggattcttaatttcatcgagggtaaggccaaccgcaattttagcagccattttagcgattggataaccggttgccttggaagcaagggcagatgaacgggaaacccgcggattaacttcgataacgttatactggaaactttgcggatcaagagctagttggacgttacatcccccttcgattttgagggcacggatcagcttgagcgcgcaatcacggagcatctgatattcgcagtcgctaagggtctgattaggggcaaatacaatggagtcaccggtatgaattcccactgggtcaaagttttccatacaacaaacgaccattacattgtcagctgaatcccgcattacttcaaactcgatttccttataacccgcgattgacttttcaattaaacattgggtgacaggggataattccaagccattcttggcaacagtacgcatttctgcatcattatggcagatcccgccacctgtaccacccatagtaaaggcgggacggacgattactggatatccgcattggtgtgcgaattcgactgcttcatcaacagtattaactgtctgtgaagccggaacaggttcaccaagctcattcattaattccttgaatttttcacggtcttctgcttcatcaatcgaatccagcttagttccgagaagttcaattcctaattcgtcgaggagaccagttttagataaggagacagctaagttgaggccgatttgtccgccaagggttggtaaaattgcatcaggatattcttgacggataattcgagagagggagtcaaccgttaatggttcgatgtagacatgatcagcaatttccttatcagtcatgattgttgctggattagaattaacaaggatggtttcgtatccttcttcgcggagggcaagacaagcctgcgtgccggaataatcaaattcagctgcttggccaataataatagggccagatccgatgacgagaattttatgaatatcagttcgtttaggcataggtgagggcctccttattactgtcaattaatgccatgaatttatcaaaaagctgttcagcatcgtggggtcctggcgcagcgtctggatggaactgaacggaaaatgcaggatactttgaatgctggagtccttcaactgtgccatcgttcacttcaaggtgggtgatttggaggtcagtatcatcaatggaggatggatcaaccgcaaaaccgtgattttgagaggtaaatgcgatttttcctgttttaagattacggacaggatggttaaaaccgcggtgaccaaatttcatcttataagttttagcaccattagctagggcaaagatttgatggcccatgcaaatgccgaaaatgggcacatgtttttctaattctgcgacagtttccgcaatagttgtcatttcaagtggatcaccagggccgttcgaaaggaggatgccgtctggattgaacgccattatttcactgatcgaggcgttataaggaaggacaattgcattgcagtttcttttatttaattcacggagaatgctatttttcattccgaagtcaagaacaactacagttcgcttagttcccggattagcgtaggattctttagtagatactttgctaataatgttctgggttggcgaagtttgttttaactgttcaagcttatctttgatatcggtaacattatcggtcataattccgcgcaatgttccatattgacgaagcttacggactagttcacgtgtatcaattccttggaggccaggaatgtggtgctttgctaagaaattagggagcgagtcagtcatgcgccagttgctgggaacacgagcgacatgatgacaaattatgcccttgatttggggatacaatgtttcgttatcttcactattaatcccatagttaccgatgagaggattggtaaagactaaaatctgattggcaaatgattgatcggtaattgcttcttgatagccgaccatccctgttgtgaagacaacctcaccaagagttgccttggtagcgccaaaaccctcgccggtatagacagtaccatcttctagaattaaatatcgtttcatgagtttcatcctttcttgcaaaacccttccactgatcacataaactagttgcacgttgtaaaaaagtttaataaaaaacgcttaaaccattggtaatgggcttaagcgtatacgaaaaattgaatatatatgtataattcaatgttagtaatacaacgctgcccttgttagcctcacgggaccaaattaaaggataatgattgatactaaactactgtaattttatgcttttgtcaagtcactaatgaatttttatgcaaaaacatgtttattataaacaaaaaactgcataaaggattttaggtattataacaaattttatttaaaataaaagtaaagtctgcaaattttgtctgcaaactctacttttttagaataattaggcttggtaagtttccttgataaagagaactgaaattgcacctaagagagcagaaataccggtaacaagcatcatgttgacttgggaactaccaagtaatgggaagagaccaaaactaagtagtgaggcaaccatttgtggtacacagattgaaccattaaataggccaaggtaagtacccatgtgtttaccagataaggcatttgtaaccattgttaatgggtaggtgttcattgaagcccaagcaattccgatcaaaacgaaggagaagataagggcgttttgtgaatggataaagaagattgatgtgtatccaacagccccaagcaaaagactgaaagcatagccagctttgtggtggttattaggaactttagccagaacatatgaccatacaactgctgcaattgattgaacagcggtcataacaccgtaccagttaccggcagcttggtaggcagcagaagaagcatccgttgttaaccaaacattcttagcgatggccccgaccgcataagttgaaaggtattggaaagagaaccagcagaagaattgaactaatgcgacattccaaaatactcgtggagcatgctttaagagggtaaaccagtttccaccttttttattgtcttcctctgaaataccatggtaacgagcataagttgcgggatcatattcgtgaacccggaagatagtaaagagacaggtgatgactaaaataacagcgccaacgtagaacgaaattacaactgattgaggaacaacaccctttttagcagtgtttgatataccccaccatgtcaaaaggaatgggaaaatggctgctaaaacggcaccggtattacagattaaactttgaatcccgtatgcataactcttttgatcatcgttaaccatatcaccaaccatcatcttaaatggctgcatcgccatatttgatgaaagatcaaggaaggcgacggtaatagccccaaaccagagggctgctaacgaaccgtatccaaatccaaaacttcctgaattaggcagtaaaatcataacgatgacggcaatgaccatcccgattaacaggtaggggagacgccgaccaccaagttttggcgcccatgttcggtcagaataataaccaatgattggctgcacgatcaatcctgcaagtggcggaagtaagaagaaccatcccaaattattaggattagcaccaattgtttggaagatccggctcatttgtgaaccttgtaacgtaaaggcgatttgaaccccaaggaaaccaaagttaatcatccagatggtactctttggtaaaattggcaatccactcgtcgaagtttcttggtcttggttaagtacgacagactcatcttgactcatgaaaaacaactcctaacgaaaaaatgtataaaataattgcaattcgagcttgtgtaagctcttacacgaataatataacaaacttatttcatttgtgcaaccgcttgcaaaaaagaatagtaaaaagtcgtgatctgtttcaataaaaagatcacgactttttaatgctctaatgtttcttgcctaggagtcttacgctatttcgcggtgtgatatggattggaataaattgtgagtcatcatcgttcaataggctcctaactgcgatgagtcccatttgataaaagtcctgagttacgcttgtaatagttgggatggtaatatcacagagaaaagtcccatcgatactaataaatgataggtcttttggaatatcaaggcctagcaaatgagcctctctgatcatgcccacagccaccatatcactagctgtgatgatcgcgtcaagattcttattcattagtgttttgagcatattttgctgaggaccaaaactgtaatccccatattcgacccatcccatatgagggattaatccgtgttcagtcattgcccgttggtagccttgaagtcgttgcttaccggttgaagaacgatcgatgccggctaatccaatccgtgagtgtcctcgttcaattaaatagttagcggctgaataaccaatttcctcgttatttgaacttgtaaatttaaatccaatatatcgggaatcagtttcgtcatagaccgatactaaccgacaaggggtattgctttcttgtaaggtgcgagctgcttgttcgtcgagggaggttgcgactagcagaatgccggcaacatgccgttcgagggcaacgctaattgcttgattaagcagtcgggcgttatggtttccagcgtaaagaataaacatttggtaaccagctttatctgtttctgcttgaatagcagcgatgatatcatttgagaaattcgtttgagtattatttaagataacggcaattaacatactactattggcagctaattcagccgctgcaaggtttttcttgtatcctagttctttagcgattgtttcaatcttagccgcggtttcgggacggtaggatttcgcctttttggataaaacacgagaaacagtggccgttgaaacgtgggcccgttgagcaatatctttaattgttggcttcatagacggacttcctttattgttttcttattaaacctattataatgaaattgcgattttttgtaaacgctttcaatgggggcttaatcattatttaaaacaaaaataggccgaaagaaaaattcttccagcctacatagctattctttatttccgtttcgtaatgataatttcacgactgcctcacagcgtgctgtttggggcatcatgtcaattggttgaatgtagtcaacgtgatagacactagttaaccgccgtaaattacgggcaagagaagccataccacatgagacgtaggcaaactttcgcggcttaacttttaagatttgcttgattaattggtcatctaacccggttcgcggaggatcaacaacaagggcatcaaagttgagtccttctttttgccagcggggaagaacttcttctgctttgccgacttcatatttagcgttagtaatattatttagcttggcattttcgttagcatcagccaccgcttcggggatgatttccattccgcaaacagattttacccgcgatgcaagtgaaaggccgattgtcccgatcccggcatatgcatcaattaaggtatcatctttgtccaattcaagggctttagaagcttcttcgtacagcacttctgtttgttcaggatttagttgtaagaatgaacgtgctgagagtttgaaatcgagtcccatcaagctttcaaggattgaatcttttccagcgaggtggatcattttatcaccccaaattaagggtgtatcacctgggttaacgttttgcataactgaaacaactgctggtagttctttttcaatgcgttcaagcaattcgcgtttgtgaggaagtttagcagaattagtaatgaaggttaattggacttccccagttgaccatgattcacggactgctaaggttttgatgataccgctattgttcttttcatcataaactgggatttgcaagtcttcgatcatcttcgtaactgctcgaactgtctccattgtacggggcatttgaacagcacaagtctccatatcaacgagggtatgactgtttggctggtaaagaccggctgctactttgccattgaccattcggatttgaaactgggccttgttacggtaaccgtattcttcaggggctgcaatagttgggcgaacatcgtaattacggtagccgtatggttgaaacttttcgagactatcgatgattacttgccgtttaaactttaattgttgttggtaagcgaggttttcaagttcaaaaccaccagcgatatcagcgtactcatctcgtggcgttacccgatcccgactctttttccggatccggtgaattttagcttcaagatagcgtgggagaacgcgtgtaacttccgcgactacgacttcatttggcagggcaccagggacaaaacataccttgtgcttatagtagccgattccgtgcccgttaacgcctaggcgacgaattgtgagggggaatcgtttcccaacccatacatcaacatcttgttcatgttgtttagtttgtgtcatattatttctccgttctattaattcaatgtgttgactattttagcacatctccaaataccactggacaaatatgtcagagatgaaaaatcgcgtaattaattttcggaatgataacttagccaaacttatagtcaattattatggaaatagtcaattaagtgtgcatattactaataatatgttttttgaatgagtaaaattatagtagaataacaatgtgaaatgttgcataaataacttaaaggaagtgacacgtttgaaaattgctgcaattgccgggtcaaatgctaatcattcatacaaccggatgttattagaatttattgcccgtcattttagtgatgatgatattgatgtgattgatattcgtcaagtgccaatgtttaatgaaaattataagggaaagattcctgaggctgttgctgatattgatcgtcgtgtttcaagcgccgatgctgttatcattgccagcccagaatacaaccactctgttacctctgctttaaagtgtgtaattgaatggctttcctatgaagttcatccattagaaaataagccagtcatgatcatcggtgcttctacccatgaccaaggctcatcccgttctcaagttcaattacgagatattttaatctcaccaggtgttaatgcttatattttccaaaacgaagagttctttatgagtgatgccgctaatatcattgataaagatggtgacattactaacgaaacgactattcatttcttagaaaaatgtatgcgtgaattcaaacactacgccaaggcaatcaatcgtatggttgctgaaaagaaggaggcgaagaagtaatgaaaatccttgctttagttggaactaatgccaatttctcatataaccggattttgcttaaatacatgaaaaagcacttccgtcaaatggctgatattgaaattgctgaaattagccaattgccaccatttagcgttgatacccctctttctgaacaaacagaggtatggaagttaaagcaaaaagttaaggctgcagacggagttattttctcaactcctgaatatgaccatgggattccagcagccttaaagagtacagtagaatggctttcttacaagactgatgtattaaaacgcaagccagttatggttgtcggtgtatcttatggacgccaagcttctgcaagatctcaagttcaaatgcggcagattctggtttctcctgattgtgatgctaacctattaccaggaaatgaagttctgattggtaatgctagtcattccttctccaaagacggtcggttaattaatgccgaagcacgtgataaccttgaaaactgctttacccattttgtggaatacattcaaatctttgaaaatgcaaataaggagggactggatatgtccgttaaacaaccaacgatcagtgaagcttacattaatttccctactggtcggttgacattaaaagaagttcaacaaatcttcagtacaatcccatttgaaattgacttaattgacagtactgaccatttcgcatggttctctgacaagccaaatcgggaacacgttcggaatgtagcttctctcggggaaactgttcaagaatgtcatccaccgttggctgttccggttgttatgaagattattaacagtttccggaatggtgaaaaagacgttgttacccgtccattatggatgaatggtcaccgttcattgattcaatactacgctttacgtgatgttaatggtcattaccttggaaccatcgaatttactggtagtgtggaatacattcttaacctcttcgaaaatggtgcatggagtactgatggtaacactggtgcatctaagcatgaggatgctaatgacaacagtgaagaagctgacagcgttgatgcatcaactggtgcttcagaatcaagtgatgatgataacaccgacaatgctagtgaagtggttacaaccccagcaccagcaacaaacgatgatactgatgcggacgctacaacaggcgtatcagatgcaggcagcgtagacgcaaatgatgatgaggcagatgctacaacaggtgcatccgaaaactagttatgaataatgaattgatggcgcagcggcatgtgatgactcatcacgctctcggaactcgcataaatttaacgatttttggcaacaaatacttttcattgttaaagaaatcaatggacctaattgaccactatgaggaccgattaacggttaaccgtaatgaatcagaagtgatgtcggtgaaccatggtgcagggaaaactccgaaaatggtatcgccaacgacttttgacctcattgagctggcagtgaaatatagtcgtgaaaactttggctttaacgctttgattggcccgttagtaaaattatggaaaatcggttttgcaggggcgcacgtgccaagtgatgctgagatcaaagagcggttgaagttgatcgacccttataaagtattgctgaaccgagaagcacggacggtatatttagaagagccggggatggaattagaccttggcggaattgcgaagggctatattgcggaccgtattcgggatctttggattgaagctggagttcccgcgggaattatcgacttaggggggaatctcttatttgttggtaagtcgccacggcgggatgatgggcagtggatcatcggtgtgcaggatccgcaactgcatcgaggtgaaaatttggcaactgtccgcgaaccggcttgttcggcagttacatctgggatttatgaacgatttttgatcaaaaatggtcgtcgttatcaccatttactagatcctcggactggatacccattagagactgatttgagcagtgtgactgttttcactgatcaatcggtaatgggtgaaattgaggctaagcgactcttcttcaatggtgaaccaatcacaggctgggaagtgcgtcctggtaaccgtggcgctatctttattcataatgatgaatcaatggtaaacgttgggctgaataaaaattgatttcatttaagcgtaggtaaacgaaatgtttacctacgcttttttgttaatgcctttagacctggttgagtgcgcgagcagagcgagtgcacgaaacaaaaaaacacctgctatgcgggtgggcgataaaaattatataaaaaaggcctcttttgccttaagatgtaggtgttcaagccaaagccaataagggaaaagaggttatataaatatggctaataaattaaatagcttagcccatacgaagtggttatgtaagtatcacatcgtattcataccaaagtatagacgtaaagcgatcttcaatcaataccgaacccgagagattatattcgtttattgtgcaaatataagagagtagaaataattgaaggtcatatgatgccagatcatgtgcacttgttagtaagtattccgccgaagctaagtgtctcgtagtttatgggatacttaaaagggaaaagtgcattaatgatgtttgatcgacatgcaaacttaaaatacaaatatgggaaccgacattttttggctgaaggctactatgtgattacagttggattaaatgaatccacgataaagaagtatatccgagatcaagagaaacgtgatatatcaatggataagctaacaagtgtggaatattcggacccttttaagggtaagtgaggtagtacaaacaccgcttaaagcggtggcaaagtagtcagagcattttggcttgagcaaagcgaaagccagcgccttgagacgccggcttttattatcggcttatagccgatgtgcaaaccacccgtttgacgggtggttatgatttgtgtgcgcctggcatggatattagctaggcggtgaaagtccgctatgggccgtagtagtcggaaccatgagctgatgacaagggtgttcattgtgaagtagaatctgaaggaagtctaaggcaaagtactgcaccgatgaataagaagtagctataaggctgaaggtaactggataaggttgcacaacaagctgaagtccaatactactcgaagttactctcagtaaagctaacggtgacatggtacgaaagttaatgttcttacccggggaggcctgacttacacgcttccgacaagaggaataagataaatttccacagaagcaagcggtagcccaagtattaacgcccatctttgagcagattttctcggatagtagctttggatttcgcccacatcgtggcgcccaagacgcaatagcgaaggtagttgatctttataatcatggttacaaacgtgttgttgacctagacttaaaagcctactttgacaacgtaaaccacgatttactgatgaaatacctccagcaatacattagtgaccgatggatattgagactaattcgtaagtttcttccgagcggagttctagatcatgggctttttgcgtgaagtgaaaaaggagcaccgcaaggtggaccgctctctccactattggcaaatatttatctaaatgagttggataaggaattgaccagacgtggtcaccaatttgtacgctatgcggacgactgtaaaagccaacgagcaggggaacgagtgatgcaaagcattacgcagttcctagaaagacgattaaaggtcaaagtaaatccagataaaagtaaagttggtagccctttaggcttctcattaggtgtaaaccagaatggtgcttacgcgcgaccagctaaagaatcacaaaggcgagttaaacacgcgttaaagcaattaaccaaacgtaatcgaggagtctcaattactagaatatttggggaaattcagcgaaaaatgtgtggatggctccaatactattcaattggtaaaataacagcgtttattcaacgattagactaatggttaaggacacgcatccgacaatacatctggaaacagtggaagaaatttaaaacaaaagtcactaacttaaagaagttaggcatgtcataccacgacgcgtataaattcgctagtacccgcaagggatactgacaaaccgcgcatagtaagacactaacttactctcttgaaaatgaaaaactggaacaactcggactaatgaatatgtccaagatgctctagtcaattcaatgtgattaagttgtcgaaccgccgtatacggaaccgtacgtacggtggtgtgagaggtcgataattgaactagtcaattatctcctactcgatttgacagattgataatgatcgaacgataaagaaaggcagaggagattggtacatatgatcattatttcatttataaaaagtgaataaaaaagagggtatgctgctttaatcttcctcaacggttgatataatagcattgaatgttaaattttctgatgataaatcagttgaaaaaaactgttaagagtgtagaatgacaattgaaagttattactaaaatgttgatattaaaagatggcgattaatcatcatttaattatcagctttttaataaaatgaagttttttaaattgctagtttagccacttgtttaataaaagattggttgtaacttgccagcaggtatcaccattcatctgatcgacagctacagatgaaatgccacctggtagtgatctttatggttgctatttatctcaaggagtactttaccttttatttataaaatggtttattgaatgacttaacttactccaaaagatagtggtaagtagtgccaggtggcttgggataatttcccttaaaactggcggatataggctattatgataacctaaaagaggcgacccccgatgcctatttaggctaattataatagtagctgtcgcttgactggatagtggtaaagccaagttattaagtgttaagcaacaatttttgtgcattgtttgttgcgactactactccctaatagatataaggtttatagccttatatagtaggtatcataaatggttgaacgctgtttagataaatttgtcaaacggtagaatgataatgcttataagaacccccgaatacttaactttaagcatgagtagcaatatctcccccagataacttaaaagtcttattgtctacgccaacagcaataagcagataacagtttagttttatcatataagtgtatttgctactaaaagttttttactgttcatgacaattgtgctaaacaacgattcaacagtacacctagtactagtgatacctgaaaagtcggcacagaaattacaacagtatggtaaatgtgctagcctactgtagtaagccgcttggtggtaggttttaaatgttgaatggtggatttatcaccaaagttagttgtgcgtaaactaaccaaaaattcaattgataaattaggaaaagtgtaataagataattgcaaaatagaaaacacgaatgcattttaagtaggttgttcagagaagcagcggatggtgagagctgtcgaccgaaactccggtgcaaaaatatgtgggcaggtaattctgcacggatagtagccgttatctacttcgaagggtgactaaagatagtcaaacttgggtggtaccgcggaactagagccatttcgtcccaaaatataaaggatggaatggctcttttttatataattaggaggaaatacgatgttagatattaaaaagattcgtcaagaacctgatttttataaggaaaagttagctacgcgtggtgtaaaaccagaagaaattgatgaagttattgcgttagataaaaagcgacgggaattgctccaacaaactgaaacaatgaaggcgcaacgtaatgaagcatcaaagaagattggagaagctaagcgtaatggtgaatctgccgatgctgccattaaggaaactcgtgaacttggtgataagatcaaggaattggacgctgaacttgaagtaaataatgctgaactccatgataagatggctcatcttccgaatgttcctcacgatggtgttccagttagtttaacggaagacggtgccgttgaattacggagagtgggtaaggttcgcgactttgattttgagcctaagcatcactgggatattggtgaaaatcttggtattttagactttgatcgcgctggtaaggtttctggtgcgcgttttgtctactacttagggcttggtgctcagcttgaacgagcagtttacaacttcatgcttgatgaacacatgaaggaaggatataccgaagtcttaccaccatatatcgtcaatgctgattcaatgtacggtactggtcaattccctaagttcaaagaaggagtttaccaagttaacggtgaggatatgactttgattccaactgctgaagttccattgactaattactaccgtggcgaagttatcccaactgaagaattaccagtttacgttactgctttaacaccatcattccgttctgaagcgggagcagcgggtcgtgatacccgaggattgatccggatgcaccaattcaataaggtagaaatggttaaatacactaagccagagaactcatgggatgaacttgaaaagatgacggctaacgctgaaaatatcttgaagaagttaaacttgccataccatgttattaccttaactactggtgacatgagctttactgcatctgaaacccatgatcttgaattgtggatgccagcacaaaataagtatcgtgaagtttcaagttgttcaaactgcttggacttccaggcacggcggatgcacacacaataccgggatgaaaatggtaagttacaatatgttcacacacttaacggttctggtttagccgttggtcggacagttgcagctatcttggaaaactatcaaaacgctgatggttccgtaacgattccagaagtattggtaccatacatgcatggtgttactaagattactaaggaaaatgcggttcctttccgtaataaagttaataaataagatatatagaagacagtttttaaaaagaagttcggattgctaaatctgagcttctttttttgattaaaaaaatctaagaaaaagtgaaaaataaataaattatacttaataaaattaacttatcgctggtcgctctctttaaaaattattgtttaaaacgctaacatcttggataaacacaaactttgatgaagaatatttattttgttttctagcgatgataaagtagtatcaacgttaaaatttgattaaaaaggagtcggtgcagatgcatagcagcaagataaaaaatatgatcatcaccattgttgcagttcttggaattgtagtggggtggcaaatggtcgagcctcagcaggtatctgctgccgaaccgacttatacgtttgcaactaataacacctttgaaccctttgaaattcaagatagtaaaggtgggtactcaggaaagaatcctgggattgaaattgaaatgcttaagaaaattgctaagcatgagcattttaagtatgaactgaagtcaatgagctttaatggtgacttacaagctcttgaagcaggacaagttgatgcagtaattgccggaatgagcgttactgatgaacgaaaagaaaagtatgatttttcaacaccttactatactagtggggttgttatggctgttgcaaaagatagcaatattaagtcgatgagccaattaaaaggcaaaacagtttcagctaagtcaggaacgagtgcggcattatttttgaagaacaaccaaaagaaatatggttacaaaattcgctactttgattcctcaaatacgatgtggaacgatgtgaagactgggaatacagcagctacttttgatgatggccctgttcttgaatacggaattaaagaaggtgtcccacttaaggttgtgacaaagaagccaattgatgcgcaaccagttgccgttggatatcaaaagggcaagaacttagaattacagaaaaaaatgaatgatgggatcaaatggctaaaagatactggtcaaatggatcaaatcattgataaatatactaagagtgacaaaacaacgaaggacagtgcgactgatcggacaatcctgggattaatccgcgccaattatcctgccttgcttcgtggattatggatgacaattgaattaaccgttgtcggcattatttttgcgatgatttttggggtaattttaggtgtattaggtattgcacaaaacaaatttgccaatgctgtttctagtaccctgatttatatcttccgtggtattccaatgattgttttagccttctttatttacatggggattccaaatgttattggccataaagttccattattcttggcaggaatcttaaccttgacttttaacgaaggggcctatattggagccattgttaaaggtggatttgaatccgttaatattggacagtgggaagcagcgcggagcttagggttgccatatagcaaagccttgattaaggttattgctccccaaggatttaagttaatgattccttcgttagttaaccagtttattattaccttgaaagatacttcaattctttccgcaatcggtgtaatggaacttacacaaacggggactgttatcatttcccagaacatggaaggatttaagatgtggttaattattgggacgatgtatatcattatcattaccctgttgacttggttatcaaactacgtacaaaagaggatggcttaatatggataaaaactataaagtacaagtaaaaaatctgcacaaaagttatggaagtaatgaagtgctgaagggtattagcttggacgtaaaacccaatgaggtggtttgcatgattgggccatcaggatcgggtaaaagtacctttcttcgttgcattaataagcttgaagaaccaaatagcggccatatttatattgatggctacgatattgctgatccgcaagtaaatattaataaggttcgggaaaatatcgggatggtttttcagcactttaatctctttccaaatatgaatgttttggagaatatcactttggcacctattcaacttggcaagatgaccaaggaagaggcagaaaaggacgcgatgcactatcttgacttagttgggctggctgataaagcgggggcagatccaaccaagctgtctggaggtcaaaagcaacgggtagccatcgcccgtgcccttgcaatgaaaccggatgtaatgctctttgatgaaccaacgagtgcccttgaccctgaaatggtagggatgttttggaagtaatgaaacggttagcgcaagaaggaatgaccatgatcgtggtaactcacgaaatgggatttgctaagcaagttgctgatcgggtggttttcttccataatggtgatattcgggaacaaggcaccccagaagagatttttgataatccacaacatccagatacgaagaatttcttggataaagtgctaaatatttaattatcgactgacttttagtaatttaaatttgacaaagctagaataatcattataataatgagtaacttctaataattggttgacagagaatctagcatttgctgaaagctggatccaattaaatggcatgagcgtttgaaatggagtagtttccttatcaaccgagaggtagtttgcaaatgtgagctataaagatgggtggaaccgcgttaaaaaacgtccctggtagatgattaccagggacgtttttatttgtttaagaaaacgtttttgttattaactaaatttttaaggaggcatattatggacgaaaaacaacaacagaagttagaacgatcgcttaaaagtcgtcatgtgacgatgattgctattggtggagctattgggaccggtctttttcttggatcaggaacagccattcaccaagcaggtccatcaatcattctttcatacctgatcgtcggtatcttttgcttctttatgatgcgggcgttaggggaacttattttagctgatacttcaaaacattcatttattgattcggttaaggaatatcttggtgaccgaatggaatttgttgctggatggatgtactgggcatgctggctaacattagcaatggcagatcttactgctactggtatttacttgaaatattggttccctaatttaccacaatgggttggtccattaattattgttattttattgatgttagtaaacatggtaaacgttgggctgtttggtgaactagaaagttggttctctatgattaaggtgattgcaattttagccttaatagcagttggcgcggtcttacttgtgatgcatggtcatgttgaaggacggccggtaactctttcaaacctagttaaccaggggggctttttctctactggtccgatgggcttcttaatgtctttccaaatggtagtttttgcctttgtgggaattgaaatggtcggtttgacagctggagaaactaagaatccagataaagatattccgaaggcgattaataccttaccagtccggattggtttattctatatcggatcaatgattgcgatgatgtcaatttacccatggttccatattaagactacttctagcccgtttgttcaagtgtttgcagcaatcggtgttccaggagcagctgcgattttaaactttgtggttttgacagctgcaatgtctgcaactaacagtgcgatctttagtactagtcgttccctctactcattagctcgaagcgggaacgcaccaaaacgttttggtgaattaagcgcgaaggcagttcctaatcatgcattaactttctcttcattgattctttttatcacagttatcttgaattatattatgccagcgggaatattcgatgtgattgctggaatttcaacaattacctttatttttacgtggatcattattttggttgcacatattaagttccgacaacaaaatcctaagggagttgcaaacttcagaatgccaggatatccgattactagttggttaacaattattttcttcttggcagttctagtgattttactctttattgattcaacacgaattccattaatcctttcaatcgtaatttttgcattgcttgcttatggttatggatttttgaagaagaaaaattaaaaacttggcagagactcgaaaattttgagtctcttttcttttgcatttgataatgaatagtttaagagagagctaaaaagtaatagaaaagaaggttttgtttaatagttggaggagatctaaatcccggtgtgacgcggtttaattgtatttttgttggggagggattatactgaaagtgtggaaagatagaaggccgaatttaacaaacatcttcttataataaaactactttgaagtacgttaattagactttttgcataaaaataccaacaccccactccacatgaaacgctttagtttccgtaaaaagtatgttagctaaaagtaattagtggctatatctacaacgaacctataatgataagcttaagttcctcgtattaagcagatagataagttaccaaaaattaaaaataataatactcggcctttcttcccacttcttcatggttgagaagcccggaatgttattttgataaacgtcccgggcttctgccagtttaacccctaaatattttatgttatttcctgggaaatactaaagttagtgaaactgtaaattacttctctaaatatttgaacatttgctcaattgattttaattgagtataatagagaaacttggcagaggcgacggaaagacacatagcaaagacgattcgccacgtgtaactttccgtttctttttactaacatatgataacgttttcatgagttctgaaaaaactttgtgaaattttaaaaagctgaaaagttaataaaataaatgaattgtaaaattataatttaaaaaatgataaaaattcacaaatcgtctacaaaacagcgctttacaggaaggaaatttaaagatattcttaagtagttaactcgccacaactgcaattatattatcttaatttggaacggctgttaacgaatattctatttaaggagggtacacagccatgtctatgtatcttattatcaacattattgggttgattgtctttcttggaattggatggcttttctccaagaatcgaaaggaaatcaactggaagactgtaggaatcatggtagtattgaacttacttttagcatggttcctagtaagttcagcagctggtcgtgctggggttaaagcggccgctgatggttttgcttggattgttaacgtctctgcaaaaggaactgtgtttgcattaggtgattggtatacaccaaagaaccttaacttcatttgttctgcattgatgccaatccttatgattgttccattgttcgatatcttaaactatattggtgtattaccatggattattaagtggatcggacgtggactttcattcattactggtgaacctaagtttgaatcattctttgccgtagaaatgatgttcttaggtaacaccgaagttttggctatttctggtatgcaattacgtgccatgaacaaggaacgtaatttgacgattgccatgatgtcaatgtcttgtgttactgcttcaattcttggtgcatatattgaaatgatgccaggacaatatattctgactgctgttccaattaacattattaactcattgattgctgtaagtatgttaaaccctgttaaggttccagctgaagatgacaccatcgaaaaggttggtgctgaagttgactctgataagcgtgaaccattcttcagtttcttgggagactcaattttaggtgctggtaagttaatccttatcatcattgctaacgttgttgcctttgttgctttggcagccttgatcgatgctatcttagcattattctggaaggacctttcacttgaaagtatcttaggtgttatcatgttcccattctcatggttacttggtttacctgttcaccaagcatggatgctttcccaagatatgggtatgaaattgattactaacgaattcgttgttatgggtaaagttactggtgaaatcaacagttacgcacctcacttgcgggctgtcttgactgtcttcgtaacttcatttgccaacttcggtactttaggtatgattattggtgccttcaagggattagttgacaaagaaaacaacgattacatcgcttcaaacattggttacttaatgctttctggtattttggtttcattattatcagctgcatttgttggtctctttgtttggtagaaatgaaaaagcagctgggaaggctgcttttttcaacattaaattcgaaaacgcttgcacgataaaaaggagataaaattatgactacaaagattattatggatactgatccaggtattgatgacgcagctgctttaacaatggctattaatgacccatcattagacttgaaattagttactacagttgccggtaacgttactgctgataagacgactgctaacgccttgaagattattcacttctttggtaaggatattccagttgccgcgggtgccaagcaaccattgattaagccttttgaagatgctgctcgaattcatggtgaatcgggaatgcctggttatgatttcggtgacgactatggtaagccacttgataagactgctgttgaagcgcttcatgacgcaatcatggctgaagatgaagtcattctggtgccaactggttcatacactaacattgcattactctttagcgaatacccagaagtaaagagtcatattaagcaaatcgttgcgatgggtggttcgttctccggtggtaacatgaccagtgctgccgaatttaacgtcttcaccgacccagacgctgctaaaattatgtacaatgcaggtgttccaattgtaactgttggattggatgttaccttaaaggcgctcttgactgctgatacaattgaaaaactcggtagccttaataagactggtgaaatgttgcatggattaattacgcactataatgatggtaatgatcaaggtcgtccaatgcacgatgttaatactatcttctaccttcttcatccagaagcatttactacaaaggatatgtgggttgatattcaaacggatggtccggccatcggtgctactgttggtgacattcgtgctgcttatcatgatggtaagaccaacgcaaaagtttgcttagacattgatgctgaatacttcaataagtggttcttagaagaagtaagcaaaatgaaataagatactgggagctgagagcttgctttcggctctttttattactttcttgtgtaaacgcttcacagtataataacagtagttaaagtaaggaggaaatgcaaaatgaagaatattatgattgctggcgctggtgtattaggtagtcagattgcatatcaaacggctttatctggctttaatgttagtgtatataaccaccatattgataccgctgaacgacggattaaggcgttgaaaagtgattatgaacgtgacttgcatttgactgataaggaatttcaacagggccttgataatattaaagttattaccgatgatattgcgactgcagttaaagatgctgatttaatgattgaagctttaccagaatcgttagagttaaaggaacagttttacgaagaggtttcaggattagcccctgaaaaaacaatctttgctagcaactcctctacatttatccctagccaactagctccttatactgatcggccagaaaaatttcttaatatgcactttgctaaccaaatttggaaatttaatgtggtcgaaattatgggcacctcccaaacaagtccagaggtgattgaagaagctacaaagtttgcccgggaaataaagatggttcctgttattcttaataaagaacaacacgggtatattctgaattcccttttgattccgttacttgcatctggtcttagcttatgggctaaaggagttgctgatccagcgatgattgataaggattggatgatttcgacaggtgcaccaatgggaccatttggcattttagatatggttggtttacggacggcagcgcaaattgaacggaatgcctatgcccagactaaggatgaaagtcataaggaaattgccgataagatggaacagatgattcaagaagggcacgaaggaaaagaatcgggacaaggattttacaattatcccaatccagctttcatggatccagattttctgaagcattaagattataagtattgaaaacttagaaaagggagcaagataaaagtcactcgtgactgctatcttactcccttattttgcgctccaattttcacgtaatccggttgcaacaatggcaaaattacggtacagtagtagaagacgtgaaacaaaaaatgtttcacgaaaggagacctaataaatgaatcctgaacaatttcaacaagcattagctgatcatggtatcaccttatcagcagaacaaatgcaacaatttgctgactattatcaattattagttgaaactaatgaacatgtaaatttgacacgaattactgaaaaggatgaagtgtatttaaagcatttttatgactcaattacaggagcgtttgctgaaccacgcttagagagtgaagaactgacattatgtgatatcggtgctggtgccggctttccttccttaccgttgaagatcgcttttccgcaattaaaggtaacaattgttgattcgttaaataagcggattgcttttcttgaagccttagttgccaaactcggtttaaccgatgttactttgattcatgatcgagcagagacttttagtgccaagaacagtccatatcgggagaaattcgatattgttactgcccgtgcagttgcccgcctatcagttttaagcgaattatgcttgcctgccgctaaaattagcggggaattcattgcttataaggcaagtgcagctccggaagaacttcaacaaggtggggcagcaattaaacagcttggtggaaaagttcaaaaaacggtgacattgactttactggaaactgatgaagaacgtaatattattgtgattgataagataaaggcgacccctaataaatacccacgtcgtccaggattaccaagcaaaaaaccaattcaataagataaggagttgaaagtatggctttttcattatttggcattggaaaaaataattccgataatacaaaaaataaggtcgtagaagtaaaaattgatcaaattattcctaatcgttaccagccacggaaagtatttgatcaagacggtatccgtgaattagcacaaacaattgacgaacatgggttgttacaaccaattgttttacgtgaatacgaaccagcaaaatatgagattattgctggggaacgtcgataccgggcgatgaagctcttgaagtgggaaaaagcgccagcaataattgaaaagatgagtgatcaagagacggcttcacttgccctcattgaaaatctgcaacggtcgcaattgagtccagtcgaagaagcgcaggcctaccgacaattaatggatctgaaccatcttacccaatcgcaattagcaaagggaatggggaagagtcagtcctttgttgctaacaaattacggttgctgcgtctgatcaccccagtccaaacagctattttagatcaccggattacggaacgtcatggtcgagcattattagatttagatgaaaaacaacaacgtgatatgttaatgcggattgttaatgaacggttaacagttcggcagacagaagatgaagttgctcgcttattagggcgtccgttaccttcagaaattgcagaattaaaagcagccgctaagcgcaaagaattagcttctattgaggatcatgctgaagaaacagcagacgttgaagaggtaccagtagaaaagcctgcagaaaagaggcgctctcctaaacgaaagacagctaagaaggcccgaagcaaaaaaactcagcaggctaatgatgcgcgtttagctttaaatacgattaaaaagtcaattaagctggcgacaaatgaaggctttgaaattaaaatgcatgagaaggaaaacggcgatacttatcaattaacaattgagattccgaagaaacagtagggaggccaaaaaatgggttctgtaattgcccttgcaaatcaaaaaggcggtgttggtaaaacaacaacgagtgttaatttgggtgcatgcttagctgagactggccagcgcgtcttattaattgatcttgatcctcaaggaaatgcaacgagtggtttgggcgttgaaaaacagaatattaagcaaagtatttatgatgttttaattaatgaagtgccattagaggatgttattcaaaagacaagtcacgagggagttgacattgctccaacgacgattgccttatctggagctgaagtagaattaactaatttaatggcccgagaaacacggcttaaggattcttttggggaaattcgtcaaaaatatgattttattttaatcgattgtccaccatccctggggctcctgacgattaatgcatttactgcttgtgactcaattctgattcctgtccaaagtgaatactatgcattggaaggtttaagtcagcttttaaataccatcaagcttgttcgtaaacacttcaatccgcaacttaagattgaaggggttcttttgacaatgtttgaccggcgcacaaatcttggacaacaggtaaattctgaggtcaaaaagttttttggtgaccaggtttatgatacgattatccctcgtaatgtccgtttatcagaggcaccaagtcacggcttagcaattattgattatgataaaaattcaacgggggcacacgtctaccaacaattagcaaaggaagtgttggctaaccatggcaaagaataaaaaaggtgggcttggtcgaggtattgaggccctctttgcggaaaatgaagtaactgagcttacggatgaaacggttcaagatatcaagttatcgttaattcatcctaatccctatcaaccacggcgaacgtttgataaagaggcgttggcagagttagcttcatcgattgaaaaatcaggggtgtttcaaccaattattctgcggcaaacggatccaaaaattaaccgttatgagctaatcgctggggagcgacggtttagagcttctaagatcgccaaacagaaaactatcccagcaattgtgcgtaagatgagcgatgaccagatgatggaaatcgcggttctcgaaaatcttcaacgtgaagaccttacaccacttgaagaagcgcaagcctatcagatgttaatggataaattatcattaacgcaggcacaggtggcaagcagattaggaaagagtcggccttatattgccaattacttgcgattactagggttaccaaaaatgatcaaagagtttcttaatactggcaaactatcgatgggtcaagcacggacaattctcggtttaaaagataagacaaaacttgttccgcttgcccaacgagctgtcgaacaaaatcttacagtgcgacaattggaagagattgtaacgcagactaatggaacggccaaaaagaaagaagaacggcggacacaacgaaaaccaatctatattcgagaagctgaatcacagttgcagagtaaatttggtacaaaagttgctgtcgcgcaaagtcggaaaaaaggcgcaggaaagatcgaaataccttatacgtcaaatgaagactttactcgaattcttgaattattaaatataaccttagattaaggaggaataactcatgacagcatatgataaaggtgacattgtaatgatgaaaaaggctcacccgtgtggaactaaccgctggaagattacacgagtgggtgcagatattaaaattgaatgccaaggatgtggtcatattgtcatgatgacccgtcaaaaatttgataagggattaaaaaaggttatcgaaaaagcggatcaagatgattaatatttttaatgattgatgatcacaaataactaattgtagattaaaataataaatgattaattgaaaaggaaagtgaacaatttatgtcattaactgcaggaatcgttggcttgccaaacgttggtaagtcaacactttttaacgcaattactaaagctggtgccgaaatggctaactacccattcgcaacaatcgatcccaatgtggggatggttgaagttccagatagtcgccttgaccggatccaggaattaattccagcgaagaagatcgtcccaactacctttgaatttaccgatattgccggaattgttaagggtgctagtaaaggtgaaggactaggaaacaagttcttggaaaatattcggcaaactgatgcaattgttcatgttgtgcgggcatttgatgataatgatattactagtgtttctggtaaagtggatccaattgaagatatcgatactatcaacttggaattagtaatggctgacttagatgctgttaataagcgcttggcaaaagtacagcgggctgctaagggtcgtgataaggatgctttagcggaattagaagtactcaataagattaagccagttcttgaagatggcaagggtgttcgctcaattgactttagcgatgatgaacaaaagattgtcaaagggcttttcttgttaacaagtaagccagtcttatacgttgctaacattgctgaagaagatatggcagatccagatagcaacaaatacatggatgcaattaaagaacacgtaaaagatgacggagaagttattggcgttgcagcagctgctgaagaacaaattgccgaaatggatgaagcagataaagcggatttccttgaaatggaaggcgttactgaaccagggttgaaccggttgattcgggcagcctacaagctcttgggtcttgaaacattctttactgctggtggtcctgaaacgcgggcctggacttataagaagggcacaaaggctccacaagcagcaggaattattcactctgatttcgaacgaggatttattcgagcagaagtaatgagctttgaagatcttgatgaattaggttctgaatcagcagtaaaggaagcggggaagctccgtcttgaaggaaaagattatgtaatgcaagatggtgatattgttgaattccggttcaacgtttaaacctctgaagctaagagaggagtagttttatagtgagtgaagaacaaccacggaatgcacaagctggtcaacgtcaaaaacaattagaaaaagaacggcggcaagcgaatgggaatgcctttagcaactatgatctaacacgaaaaaatgaagattttatgtatcaattaaataaacagttggatcgtctcggtgttccttcagataagaaagactcgatgctaaaggaaaccattgataaattgctagcaggacaaaagaaggggcaaactgcgcgggcattatttggtacgccaactgaatatgctaaagaattgaagaacccaaagccaactcctgctgaagcaagtaagcaatcaattaagttgttagcaattgataatatgctgattttcttgagtatctttacttttatgtttggcttaatgttctggttatcaccagctgcaatgcaaacaaagaatgctggaagcagtggtattactgcaatcttaatcgtggcgatcactggaggattgatttttggttatgtggctacccaagttcaaccgcaaattgataagaacggtaagcgggtaagtaagaagccattatggcaacgaatccttttgatagttgctggattagcagcttggttgattatttacatgcttgtaagtatgttgccaaatgtaatcaacccacggcttaatccatggatctacattggcgttggggttattacgttcattggggatatgtacttcaggtccaaatttcatgttacaggttccctttacggtaatcgtgcgccacgacgttaaccagcaaataattttagtaacggaactatttgccaggttatcttattaaaataaataagggtgagaaaaaggtgaaaattttttctcgcccttttattttgctcttttttgaaataaatttctgaaaatctatggacaaatgttcaacggattgttaagatatatacgtaaacttatgaaaacgcattcaaaattgagaggagatcatattattatgaagttaacgcaagcgcaattagcaaaatacatggatcacacaatgcttaaaccagaagctacccccgaaatgattgataagacagttgaagaagctcgtaaatacaatacagcttcagtttgtatcaatccttactgggttaagcgagttcatgaaggattagaaggtactgatattaacacttgtacagttatcggcttccctctcggtgcaacttcaacagaaagcaaagtttttgaaactaagcaggcaattgaagatggcgccgatgaaattgatatggttatcaatatcggtgaattaaaagcaggaaatgatgatgcggttgttgctgatatcaaagcggttgctgatgctactcacgaaaagggtaaacttcttaaagttattattgagaatgctcttcttactgacgaagaaaaagcacgtgcaagtaaacttactgtaaaaggtgatgctgactttgttaagacttcaactggtttttcaacttcaggagcgaaggtagacgacgttaagattatgcgtgaagcagttggaccagactttaagattaaggcagctggcggaattcacagccttcaagaagcttacgatatgattgaagctggtgctaaccgtttaggtgtttccgcttctgttcaaatcttagaagaagccgcaaaacaataagaataaagtttaattactaatcttaatttacagaaataggaggagtcagaaaatgtcatataaacgtgtttttgttattgtaatggactcagttggtacaggtgccgctcatgacgccgcaaagtttgatgatgttggatcagatactcttggccacgttggtgagtattacaaaggtgccttgaagttaccaaaccttggtaaattagggattagtaatttacgtgatactccgattgaaggtgttctagttgctgatccagctattggtgattacggtaagatggaagaaatttctgccggaaaagatagtatggatggtcactgggaaatgatgggtttaccagtaatgaagccattgtcaacgttccctaatggttttccacaagaaattgttgataagcttgaaaaattctcaggacgaaaggttattgttaacaagccatactcagggacagaagtaattcatgactatggtgaacgtcaaatggagaccggagaattaattctctacacgtctggtgattcagtaatgcagattgctgctcatgaagatgttattcctgttgaggaactctacaagatttgtgaatatgcccggacacttgttaatggtccagaatatactgttggtcggattattgcccgtccatatgttggtcccgataaagatcactttacccggactgctaatcgacatgactttagtttgaagccaattggtgagactgatatggatcgtcttcgtgcagcagggtacgatgtaattagtgttggtaagattaatgatatcttctctggtgaagggatcgataaaggataccataacgaaagtaacatggacggaatggatcatgttgatgaagtaatgaagcaagactttaccggtttctgctttacaaacttggttgattttgatgcaatgtacggtcaccgtcgtaatccaaagggctttggtcaagcattaatggactttgataagcgtctgggcaaagttcttgatgaaatgaagccagatgatcttttaatggtaactgctgatcacggtaatgaccctggctttaagggaactgatcatactcgtgaaaatgttccattgctggtttactctccttcaatgaacaagccaaatcaatcccttgggttgcggaagacattctcagaccttggtgcaactatcttagagaactttaacgttgaaccagtaaaaggtaccagcttctacaaggaaattagtaacgattaagattaattaaggaaaggggcgaaacacgatgcgaatggttgatatcattgacaccaaaagaaatggcggagtcctaagcgatgagcaattacaattctttgttgatggcgtcgttaatggaacgattcctgactatcaaatcagtgctctccttatggcaatctatttccaggatatgaccaaagaagaacagacgagcctaacaatgaagatgatggagtctggtgaacgattagacttgagccgaatccctggaattaaggttgataaacattcaacaggtggtgttggtgataaagtgagtttgccacttgcagcaatggtcgccgctacaggaattccggttccgatgatttcaggtcgtggtcttggtcatacaggaggcacgcttgacaagttagaagcaattccgggatttcgagtagaactttctgaagatgaattcattaatcaagttgctaaagaaaaattagcaattgtaggtgcgactggtgaggttgcgccagcagataagaaaatttatggattgcgggacgttactgatactgttgactcgattcctttaattgctagttcaattatgagtaagaagattgcttctggaacagatgcgcttgtaattgatgttaaaactggtactggtgcctttatgaagacgcttgatcaatcaagactactagccaaagcgttagttgagattggtaaacaagcaggattaaagtgtatggcagtaatctcagatatgaatcagccgcttgggaataaaattggtaatgcccttgaaattgaagaatcaattgatgtcttaaaaggaaagggaccaaaagatcttactgaattagtcttggcgcttggtagttatatggttgtaatgggtgaaaaagtacaaaatactactgaggcacgaaagatgttagagcaaactattcaggagggatcagccctggaaaggtttgcggcaatgatagaagcacaaggtggagatcctgctgttgttgataactaccaattaatgccgcaagctaaatacaagattcctttcaaggctgatcgggatggcgtattgacaaaactttcagcagatgaagttggaactgctagcatgttattaggtggaggtcgtcaaaaggcagatgacacccttgactatagtgtaggaatcgaattgcaccataaactaggtgaccatgttaaagatggcgaaccaattttaactatctatagtaaccgccaagaaattccagacgtagaacagttattaaaagaaagtattaaaattagcgatgatggcaaagtaccgacgctaattcatgaaattattgaataaaaagacaggaggatatttcaatgagtacacatattaatgcaaaaatgggtgattacgcagacactgtattacttccaggggatccgctacgtgcaaaatatattgcagaaaacttcctggaaaatgttaaacaagtaaattcagtccggaatgcctttggttatactggtgaatataagggtcaccgtatttcagtacaaggatctgggatgggaattccttcgatgtcaatttatattaatgagttagtacgcgaatttggtgttaaaaccattatccgggttggttcttgtggcggaattgctccagatgttcatgttcgcgatgttcttcttgcccaagggtcttcaactgattcagcggtaacggtaaatacatttggatcaggattccattacgcaccattagctgatttcaagttgttagatactgcctatcatgtagctggtaaattaggtattgaaacaaaagttggggatatctttgctgccgatcgtttctacaatgatgagcttgatatggaaaagcttcgtgactatggaattttaggaacagaaatggaatctgccggactttacttgttagcggctaagcttcatttccgggcactttcagttttgactgttagtgacttaatctttggtgacgaaaaagcaaccgctgaagaacgtgaacgaacattcaatgatatgattaatatttcgcttgaaacggcaattgctggaaagtaacttcttgcataagctagagagtgcattttataataaaatgtggtttagataatgaaagtgagtgggaattaaccttctcgacaaggcggtgggctaaggatagaatggtgattagcacggcacgggttgattatcgttcgaacttagcctctagccttgtggttaatttccacgatatcgtaacaatattagtataaaaaacgaggctgttgaaaaaacaaaagttttttctcagcctctttaatatggggaaaggagggaaattagatgaatgataaagataagattgaattagcgctaaaagtagcaaccttatattatcgtgatggatggaaccaaagcgatattgcaactgaactaaatatttcccgggcaacagtgtcacgattattacaatttggtcgggatcgaggattagtaaccattaaaattcataatccggttgctccgcttcaccagttggaagtagacttactcgctaaatatccatcattgcataaaattattattgttccaggcacggatgatccacttgaagaagttggcgcagcgggtgctaaatatatcgaacaagtcgtagaagataaagacattattggcttaggctggggaaaaaccgtctatcaagtaggattgcatttaaaacctaaagacgttactgatattactgttgttcaaatgaaaggcagtatggcaaatactaatacgcgaaattatgcgtttgaaacggttaatatctttgccaatgcttttaataccgttccacagtatttgccgttaccagttatctttgatcatgcaaagacacgtgaattagttgctaatgatacccacatcaaacatattttgaaattaggggagcagtctaatatcgctgttttcacagtggggacagtacgtgactcagcattgttatttaaattaggttatttcaccaagcaggagcaattaacgttgcaacatgaggcggtaggggatgttttctctcgtttcattgatagcaagggccagatagtaaatgaagatattaatcaacgaacaattgggattgcgctcccagagttgcgaaagaaaaaacacagtattttagtagcagcaaatgttgctaaggtaccagcagtgcatggtgttttaactgctggttatgcaaatacattggttattgatcaggagagtgcgaatagcctagttaattttttaaattaatttaaatatttagattgacctcagtgcgaaatcctagtagagtatacctaattaaaaatcaaaggagttgcactacagatgtcaaattgggacacgaaatttgccaagaagggcttaaccttcgatgatgtattacttattccagctgaaagtcatgtattaccaaatgaagttgacttgagtacacagttagctgataatttgaagcttcatattccgttgattagtgccggaatggatactgttactgaaggaccaatggcgattgcaatggccttacaaggtggcttaggggttgttcacaaaaacatgtcaatccaagcccaagcaggagaagtagctaatgtaaagagcgtagtcgtacctgcaggagcaactaaggctgcagttgatgagaataatcgtttattagttgctgcagcagttggggttactagtgatacttttgaacgtgctgaagcccttttgaaggcgggtgcagatgctatcgttattgatacagctcatggacattcagcaggtgttcttcgtaagatcgcagaaattcgcgaacacttcccagacgcaactttaattgccggtaatgttgctactggtgaagctactcgcgctttgtttgatgctggtgttgatgttgtaaaagttggtatcggtcctggttcaatttgtactactcgggtggtcgctggagttggtgttccgcaaattactgctatttatgacgctgctagtgttgctcgtgaatataacaagccaattattgctgatggaggtattaagtactctggtgacgttgtaaaagctcttgctgctggtggtaatgcagtaatgcttggtagtatgctttctggtactacggaagcacctggcgaagtttttgaagacaatggcaagaagtacaaggcttatcgtggaatgggttctgttggtgcaatggctcaagcacatggttcctccgaccgttacttccaaggtggggtaaatgaagctaataagcttgttccggaaggtattgaagctcgggtagaatacaagggcgatgtttctgatattgttttccaaattgatggtggccttcgttcaggaatgggttatgttggtgctggtgatattccaacattgatcgaaaaagcccaatttgtccaaattactaatgcaggacttattgagtcacatcctcatgatgtccaaattactcgtagtgcacctaactataaataattaatttaataaggaactgctatggctttattcatgaagatatagtcacagcagtttttatttcccgagaaataatggagggtaaactttttgttaaggctatcctagaatgatcgcttttttcgcatagttagttataatattcaataggatattatgctgcaaaaaggagtacctcttatgaaaattctagttgttgatgatgataaagaaattgttcaattacttgaaatttacatccgaaatgaaggatatgagccaatttctgcttacgacggaaaagaagcgttgacaaagctaaatactaatcctgatatcggtctgattattcttgacttaatgatgccagaaatcgatggaatggatgtaattaagcgggtgcggaaagattctgatattccaattttagtgctttcagctaagacggcagatatggataagatacaaggtttaatcactggtgcggacgattatgttactaagccatttaatccgcttgaagtaatggcacgagttaaatcattacttcgtcggagccaaggagaagtgacaaatgatcaaccagatattcttaatgttggtccattattaatcaataaagattctcacgaggttaagacgattaaaggggatgtaattcaattaacagcccttgaatttggtatcttatacttactcgccagtcaccctaatcgtgttttctcagcagatgacatttttgagcgggtatggcaacaagaaagtgtcgtatcagccaaaacagtcatggttcacgtgagtcatttgcgggataaaattgaagaagcaactaacggtgaaaaggttattcaaactgtttggggtgttggttataaggtggaagaccactaaagcctagccttaaggatgtggaggaaaaattgtgaagttaacggggcgtgaaaagagttcgcttattttagaaggggtagtaacggttatcttattgttattgctgaatatggcgattatcgtaattattcaagatgccattcagtcaaatccgggagtaaccaatggaatctttatgattaagcaatcattgaagattggtcctcttcaagcacaaatatggagctatcagcggatcttaattgcctttttagtaattattgatgtgtgggtggtatggtggcgattgcgtcgccggtaccacctttatcagatggatcatattatcgcggaattacactatattgcgcagggacatttggatcatcggattccgtttcggctaaaagggaatcaacagcatgttattactagtgtaaatgcattagttgatagtgcggtgcgttcaatggatgatgaacggaagattgaaaagtcaaaagatgaactgattactaatgtgagccatgatttacggacgccattgactagtattattggctacttgggattgattgaagataagcagtatcgtagtgaggaagatattctaaaatacacccatactgcttatgagaaagctaagcaaatgaagaccttggtggatgatttgtttgaatatacaaaagttcagcaacatggggcaccggtaaatattatgaaaatcgatcttaaccagttaattgaacagttaacggcaagttttgaattagaagcccagcaccgcggaatcgaaattacttcctcagttatccctaatcctttaatgattgaggcggatccggagaagcttggtcgagtttttaataatttagtttcaaatgcctttaaatatggcaatggtgcaagttacattcggatcgatgcccggcaagaaaatgatatggtggtcgtcaaagttgctaatgatggtacaccaattcctgaaaaagcacttgaccacctatttgagcgtttctaccgcgcagaagcttcccgttcacgagctactggtggaacgggattaggtttagcgattgtcaaaagcattgttgatcttcatcatgggagcgtcaaggttacttcaaatgaagacgaaacagcatttattgttacattacctttaaaacaagaagttaaagaaaccaaccaaaaatgagaaaaaagtctaaaatcaaatgattttagacttttttctttttcaattatattcaactaattttatatgtggtagactaaaagagcattgtgtcacttgatattataaaagatacaaattattggaggaaattctgtggctaaagcacaaataaatccagaaaggacacgctggcttgaggtgcttggtgtctcaatgccattatgtcttagttatattccgattggattggcctgtggaatcttactacacgcagcaggtttaaactttataatgattttattggtgtcggtattagtgttctctggtggggcacaatttattctggcatcgttattagcaagtaacgctccattagggactatctttatctcacttttcttcttagagttacgatatgcattgttaggatcgagtttatctaaatatattaaggataaatcagcacgtttcatcctcatcttttctgcatcaatgaacgatgaaaattatgctgttaactatatgaagtttgcaactgataagaaatgggatcccgatgacgcgttgttagtggagtattattcacttgcagcatggtcgacttcaaacatggttggtggtttgatcggtggtgcaatttcgattgaccttgaagtggttgattttgcattaacggccttatttttatatatgatcgtaatgcaggttcaaaaccacttgaccctagttattggcatcttggcagctgttcttggtgcatacttccaggcattgactaaaagtacacttgggattattattgcaaccttaattgcttcctttgttggattcttgattgaaaatacagttcgtcaccatagtaagcatccaaactcgaactggttcttgacaaaaatgtttaggccgaagatcacaaagactacgatcgaggataaacaagctcaacaaaaagaagttaaggaagttgaaaaactggaaactaagattgaagatgttgttgaacaccatgatgagaaacatgaagagaaaaaacatgatgatcaacatcctgatgagggctagacatggaacaactattaagtaataaaatcgtttaccatattatagtgattatcttggcagctttagcggcatttattccccgttatctaccagtattattcttctcaacgcgaaaaatcccagaatggtttaatgaatggatgaaatatgtcccagttagtttatttgcgaccctggttgtaaaagggatcttcttaactggttcttatcattttactctattcggttatccagaacggattattgcagcattgatcgtgattgtgattgcgtactttactcgatcaatgtcgatttcagtaattgctggattggttgctgtttggcttctgagtttagcgttataagagtagttttgttataattataaacagtggattggtttctagcttgcgaagaagccaatcccttttattttaggaagtgagtacgttggattttaagcaaacaattgcatttgttaatcttgctaatactttggattatcaatatgcagcaaaaaaatcagggataacggttgatgaattggttcacacaattaaggcgcttgaagaagagcttaacatcaagcttattagacctgaaggcggcgtagttgaattaactgaaatcggggcgttttaccgttgatcactgagattgctcaaaaacatgctaaattattatcggtagttacggattatcgaaaaaaggaagcggaagaagcgatcaaagttactgtcgtcccaggctttgccaattatcaagcagccccggttgttaaaaaattagcccagcaacataaaatgaatcttgttgaagatgttgatccaatggcacagctacaacaaggggaaagcgagctggcatttattagttatgccggcaaacttcccgatgattttgaggtgctttcagtgggaactgatgacttagtagcttatatcccagcgcggaacccactttctaaacaaaaggaattaacgcttactgatctaaaagcagaaaaatttttaacactaaaccatcaaaatccatttgcagtctttgttcaacaggtttgtgctgcggctgggtttgaactatattctgtttttgaaggagaaaaaggaagaacattagtaaatatggttgctttagggatggggataaccttgttgatggaacaatcaataagtgaaaacttagatagtaaagtggttaaagtgccgattgttcccaaagttactcaaaaccttgcatttgttcgtcgtaaaaatgtagaatacacggcagagcaagaagagttatggcaagctctaaaagaatcctttgaaaaatagaaaaaaggtttgacaatttcgcaaactacgcttattatcataaataacaaaaatacctttaacttagtcccgtgaggctaggaaggatttaattgagcgtttaagtacaccttcttagctattgctgagaaggtttttcttttaagcagtagcaccaagaatacgccagtaaaatcaataggtattttgaaacaaccgaccatttaattgtttccagagagagcagaacggtatgttgtttttagcctacttatatcctaaaagcaaacagtgatgcctctcgaaatttaaatgggaagttatcactgttttgttgtaattagactggaaaaggagcgctattgatgattagtacagaaagaattcaaccaaatttagtaacagttgccgacatggatgcagcagatgcaattgatttaattcatgaagcccaagcatataaagctggaaagcaagcggttctcactgcaccggcatacgcggttaacctcttctttgaaaactcaacccgaacaaagactagtttccaaatggcacaaatgaagttggggatgaatgtactagaattcgaagcgggcacgagttcagtgaaaaaaggggaaagcctctatgacactgttaagacaatggaatcaatcggtgtaaatgttgcggtaatccgtcatcctgaaaatgaatattacaaccaattgattaatcattcagaccttaagatcggaattgtaaatggtggtgatggtagcggccaacatccatcgcaatgtttacttgatatgatgacaattaatgaagaatttggcgatttcaaggggttaaaagtactaattattggtgaccttagtcactctcgagtagcgcactcaaatgcaatgatgcttaatcgtctaggagcagaggtttattttgctggcccagaaaaatggtatgatcctacgctggaacaatatggaacttttggtgactttgacgaattgcttcctcaaatggatgtagttaatttactacgagttcaaaatgaacggctaacgactgctgacggtcaagcttttgacgctaatcaatatcaccaagcttatggtttaactttagagcgagccgcaaagatgaaacagggggcaatcattatgcatccggcacctgttaaccggggtgttgaaatcgatagctctcttgtagaagcgcctaattcccgcattttccaacaaatgacaaacggcgtatatacccggatggcaattcttagtcgagttcttcgttaccaaggattgatgtaaaaaggtgattacgatgagtaaggcagttttactaacgaatggccgacgagtttataatgatgaattggttaagactgaagttttgattgtagatagcaagattaaggcaattggcgagcatatccaggcaccaagtgatgcagaaaaagtcgacctggataatggcttgattacaccaggactaattgatgttcatgtccatcttcgcgaaccaggctataccaataaagaaacgattgctacaggaagtaaagccgctgcacatggtggctttacgacaattgctgcaatggccaaccttaatccgacatgtgacacaccagaaaaatttaaagaacaggttgatcggaacgagaaagctggactggtaaaaatcctccaatattcaccagttacagttggtcgggctggaaaacaagcagttaatgttgctgagcagtatgctgcaggtgcccgtctttttagcgatgatggtgcgggaattcaagatgctggagttgtataccaagcaatgcaacaactagcgaaagttaacgctccgttatgtgatcatgcgcaagataatcaacttgcacaaaatggggtaattaatgatggggcaactattgctaaaaaactagcactaccaggaatgccagcgattagtgaaacagcgcaaattgctcggaatttggtgattgctcaggcaactggggtccattatcatgtttgccatgtttcaactaaagaaagtattgacctgattcgtcatgccaaacaacaaggaattaacgttacatgtgaagtgactccccatcatttacttttagccgatgctgatattaaagaggatgatgctgaatttaagatgaatccacctcttcggcagcgtcttgaccaacaggcttgcttaattgggctattggatggcacgattgattgtattgctactgatcatgcgccacataccgatgcggagaagcagcaaggatttcttaaatcaccaaatggtattgttggctcagaaacagcttttgccttactctatacacactttgttaaaacgggtatctttacgcttgcccaattgattgactggatggccgttaagccgcaagcgatttttaaccttgataacgctggattattaaaggtaggggacccagcagatattgctgtatttgatatcgatcatcaagatgtaattcaaccagaccagtttttctctaagggtcacaatactccatttgttggtaaacaagtatacggaatgactaagcgaacttatgtcgatggaaaactcgtatatctggagggagaaggataatgcaagaaacacaacgattagcagttgaattgccgggattatcactaaaaaatccgattattgcggcaagtgggacttgtggatatgggcaagaagcagctaaaaagtataatcttaatcatttaggctcccttgtgttaaagtccactaccctccatccccgccaaggtaatccacgtccgcgagtttgtgaaaccagtgccggttggcttaatgctaatggtcttcagaatgtgggcattaccgcagcaactaatgaaaaaattccgtggttacgaaaaaattatccgcaactaccgattattgcaagtgctgctggtttttctgaagacgaatacgttaaagttgttagtgaatttgctaatacggctggggtgaaagcaattgaattaaacgtatcatgtccgaatgtaaaacacggcgggatggcaatgggaactgatccagaagtgcttcaacgattagtaaaacaagtagttaaagttgccctaggaattcccatctatgtaaagctaacaccaaatgtaactaatattgttcccctcgcgcaagcagctgagcaagggggcgctaatggcctgacgatgattaatacgttaacgggattaagcatcgacttaaaaactcggcgcccggctttagctaatgtaacgggcggtttatcaggtcctgccattaaacctttagcattaagaatgattcaccaggtccgccaggtttcttctttaccgatcatcggcgtgggtggaattgaatcagctgaagatgttcttgaatttatgatggcgggtgctaatgctgttcaaatcggggcagctagttttcatgatccattggtttgcccgaaaattgcagctgatttaccaatcgtaatggatagatacgggattaagaaacttacggatttatgggaggtaagattttgaaacgcttcgtaccgatggtggctatcgatgttgcaactaagcaggaagcaattgacctatttgataaattaatggtaaaaccgcagccgatcgtaaaaattggaatggaattatattatggcctgggacaagtaattgttaaagaggcgaaaaagcggggatttaaggtattccttgatttgaaattatacgatattccgaatactgttcatcgcgcaatggcagctattggccgattgggaattgattttacgacaattcacgcagctggaggtagtgaaatgctgattgccggattagccggtctagaagaaggagctaaggaagcaggcgttgaaccagcaaagttattagcaattacccaacttacttcgattgatgaaaaaattctccatgaacaacagcatgttgatttgtcgttgattgagtcagtccaaagttacgcgcgcttagcagaaaaagtaggattggccggcgtagtatgctcagcccatgaaatcaaggcaattcgtgaagtgacgggggatgatttcctatgtgtaacgccaggaatccgcccaactcatgcaataaaagatgatcaaaagcgagtggttacaccagcacaagcaagaatagatgggagcaatgcgatcgtagtgggacgaccaatcacccagagctttgacccagttgctgcttatcaagaagtccaaaaagcattcttaaatgaggaggaagaaaaatgacatattcacaacgcgttgcaaaagcattattagatattcatgctgttacccttagcccagaccaaccatttacctgggcaagcggtctaaaatctccaatctataccgataatcgattgacgatttcttatccagaagttcggcaagcaatttttaatgggatggttgaacaaattaaacttcattttagtgaggccgatgttattgccggaacagcaactgctggaattcctcatgcggcatgggttgcccagaatatggaattaccgatgatttatgttcggactaagccgaaagatcatggtcaaggcaagcaaattgaaggggtgcttaaagaaggacaaaaagtcgtcgtgattgatgaccttatttcaactggtggtagtgtattaaacgctgtgcgggcggttaacaatgcaggcggaaaagtaattggcgttgtttctgtctttacttatgatttgccagctgctgaacaaaactttatggcaaatggactaaaatactattcagtaacggattatatgactttgattaaggtcgcaaaggaaaatgaccaaattagtgcggaccacctcaagtctcttcaagaatggcggaaagacccgttaagctggagtaaagagcaagcatcataataattaattatcaaaaaagcctaagattgattcagaaaaaagttaatctgaattaatcttaggctttatcttattgtttatcttcccaaatcttttggagcattgggtagcgtaagtcaccaacttgtactacttgataatctgcatttgctaatgttgtagcatcaccaacgccaattgcaattgcatttatatggtgaatattttcaatatcatgagctgtcgttccaactccaatgcaattagctccgataagatttaattgattaacagcagttagatatgggctttctttatcattagtcctaacgatactatcgacataattatcaaggccaatttgtttaaggacattttgtacatctccattagcatctaacacggcaattttaacgtaatgatcatagagatttagtaaaagacgcttaatccctggaagttgatccttttcacttaggctatccgcttcttcgttaaggaatttttgccattctgcaatcattgaagccttttcgcttggggcaggattagcattaaaatgtgctaagactagggagagcccttgcgaaggagtaaggttatcgaattgggaagctaattttccaggtaatcccatcccaaattcatacattacaaaacgttgccatgcagtaaaggataacttatttgtattaacaaagatattattaaacgaaaaaatcgcaccatccatgattaaacatcccttcatagataattatgtctatattttaacgtaatcgaaaatgaaagggaatacattaattaagcatttactttagcgaggttagcggcataatcgattccctttacatctaaatactcaataatttgattgattgtaataaatggtacatgaactcggttagcaaggactgacagactatcacgacgagccatcgtgccgtcacgctttaacacttcgataataacagcaactggtgcctttcctgctaaataggcaagatcaatagctgcttcggtgtgaccgattcgatctcttaatccatgaggttgggcgtaaagaggttgaatgtggccgggatgattaaagtcagatgcttgggcagttggcttggcaatttgccgaatcgttgctgcgcggtcaaaagcggaaacaccagtagtaacaccggttgcttctaaggtaccatcagtagtaaccataaatggtgtttggtgtgggtcagtgctatgctctaccatgggcttaaacgctaaatgcttagcaatatcttcgcttactggcacacacatcaaaccatttgcctcgttcaacatttcatagatagtatcagcgttgacattttcacctaaagctactaaatcaccttcgttttcacgatcttcattatcggctaagataatataaccaccatttactaattggtttaatgcttcttcaacagttgaaaattgactttgcataatttatatactcctttgaaattctgaaagtgatagaacagttacattcgaatgtgttattataataacgaacgttttaatttaaatcaacctatttttaaactaaaacacgaataatattaaaagatttcaaagggtaagtttgctaaagagctggagaaaataaagatttctcaccagctctacgctctatctttagagtaacaaaaaagtccagaacgagatatttttcgtcctgaactaatcttaggttgttctattttgtcatgtaatcacgagtcattggtaagtttttacctgaaggacccttagttatcaagtattgaataacatcaatatttccagattcaaatgatgcagcacatgtttgaagatataaatcccacatccgtgtaaaacgttcacccatcatatcaaggatttgagcacgatgttcattaaagttcatgtcccaaatttcgagggtgcgttgatagtgacggcgaagcatttcgatatcagcgatttgcatatgattttcttcaatgtgaccgatcatttcttcgagaccaggtacataaccgccagggaagatatacttgttaatccacccattatatgcaccgccttgttgacgagtgataccatgaatcaaggcaacaccatcatcagcaaggcaaccttggatatctttaaagtaaaaacctagattttcttttccaacgtgttcaaacataccaacggatgtaatataatcccacttttggtcaccaagttcacggtaatcaacaagtttaacttcggcaacgtcttgcaaaccttctttttcaatccgttccttaacaaagcgatattgttcttcgcttaaagtaaccccagtaacttttaagccatattcttttgcagcagttaacattaatgttccccaaccacatccaatatcaagcaatgttttgccaggctttggatcaagcttctttaagatgtgatgaaccttatcaacttgtgcttttgtaagctcatcatggttgccatcagtaaaataagcacatgagtaagttagcgtatcatcaagccataacttgtagaagtcgttcccaacatcataatgactttggacatcattttcgctctctttttctgagtggccttgtttaggcaaaaatttgcggaacttagaactccgcataaaactatcggcactttcatatgctgattcgatcaatttttgaatgctaccctggatctcgattttcttatccatgtaggcttccccaagtgcaattgaggcgttcttggtaatatcacgcattggaattttctcattaaaggtgatagttacctcaggagttccgtcaccatagataacacttgatccatcccaaaatacgatctttacgggaatgttaaatgagtgctttagtagtgacttgtagaacgtcttttctaacatgaaacgcatccttctttctgcaataataatattcattataacacccttaaaataaaagtgtttcaagacaattaatgaaaacatttcataagaaagcgataaactaattgctgaaaaaatgaaagcttgctactatgctaattagtaggaaaaatagggagatgattgaatgacgaatgcctggaagcattttattgagaatgtaaaactacggcgtttcactgtcttattattaatcattgtcgtactctggctaatgaaatcaatgatgaatttaattttatttacatttattcttacttatcttgttgttagttgggtaagactcgtccagcgatggttaccacgaatgtcgacaagtttaattgtaatcgttacctatgtattgttaattgttctcttatacttaggggtgacccgctatttaccggttttatctcggcaagttgttaaaatggtcaattcagtagttcatttctatagtactcatcaagcgacgatgatatatcgttatgtcagccattacataagtaccgccactattatgagtcaggttcggcatgggataacaatcgcggttagtactttgacaagtattggtgcaattaccgtttcatttgtaatgtctttaatcttgagctttttctatacgcttgaattaaaacaaatgaatgaattttctcatagctttttagatagtgattttggctggtttttccaggatattgattattttggtaaaaaatttgtcaatacttttggggtagtattagaggcccaattttttattgctatttgcaatacagtgattaccacgattggcctattatttatgcggatgccgcagatttttgccctatcgttaattgtgtttatctttagtttggttccggttgctggagtaattatttcaacaatcccattggcgatggttggttactcagtcggtggaattcgcgatgtggtttacattatcatcatgattatcatcatccatactttggaggcctacgtcttaaatcctaagtttatgtctagccggacagatctaccaatcttttatacttttatcgtattactgattggtgaacatctttttggtacatggggattgattgtgggggtaccaatctttaccttcttacttgatgtattaggcgtaaagcccattcgcggtgcaaaaagaataaaaaaagaagtgtgagtgagaattagccttgtgacgacgcgaagctatttccataatgtcttgctactattcatggaaacagttaaggctgggagaaaaagttttctcctagttttttgttatccgaacaatttatgttaattcattggataaagttaattaaaatcgaacttattttgcaaaattgctgaaaaagtcttgagttagtgtataataaaattaagataggtctaaagaaaggaagctgatattcatgacagacatcgagattgcagaccaagcgacactggaaccaattacagaaattgccgagaaactcggactttcagaagacgaaatcgaacaatatggtaagtataaagccaaaattgatttaaatgtaaagcctttacctgataaaaaacataagctaattttagttacgtccatcaaccctactcctgctggtgaagggaagtcgactgtcctcattggcttaggggatgcattaaatcagttaaattatcagacaacgattgcaatgcgtgaaccatcgatggggcctgtttttggaatcaaaggtggtgcaactggtggtggatatagtcaggttgttccaatggaagatattaacctgaactttaccggtgacttgcatgctcttacaagtgctaataatactttggccgctttaattgataactatattatgcgtgataatgcaatgaaccttgatccgcggcgaattatctggaaacgggtagaagacgttaatgatcgtgctctccgaaatgtagttaccggtcttggcggtccaatggctggtgttccacgtgaaacaggctttgacatcacagctgcttccgagttgatggcaattttatgtctatcaactagtcttcatgacttgaaagaacggattagtcgaattgtagtaggatatacatacgataaagaaccggtcacagttggccagcttaattttcaggatgcaattacaattatcttgaaagatgcattaaagcctaaccttgtccaaactttagaccatacgccaacaatcgtacatgggggaccatttgccaacattgcccatgggtgtaatagcgttttggcgacgcaaactgcccttaacctttctgactatactgtgacggaagctggctttggggctgaccttggtggggaaaaattccttgatattaaacaacgtgttcttggtaagcatccagatgcaattgtcatcgtagcgactgttcgagcgctagaatacaatggcggtgccaaacttgcagacttaaatgatgaaaatcttgatgcgctgaaaaaaggaatggcaaaccttaatcgtcacattaagaatatgcaattatatgggttaccaatcgtagttgcaatcaaccattttgtcagtgataccgataaagaaattcaaatgattaaggatgactgtgctaagcaaaatgttgaagcaattttgactgatgcttgggctaagggcggtaaaggtacccatgatttggctaataaagtagtcgaacttgctgatagtccaagtgaatttactcatatctatgacgttcaagttgatgaccttcaaactaagttagagaagattgctaagcagatttatggtgctaaagaagtatcatttagccgtaaagcacaaaatcaattgaagcgatttgctaagtatggatggaatgacttgccagtatgtattgctaagacccagtactcatttacagatgaccaaaaacaactcggtgccccaactgactttactttccatattcgggaattggtaccaaagatcggtgccggctttgtcgtggcattagctggtaatatgatgacaatgccaggcctccctaaagaaccagcggctgtaaacatgacgattgacgataatggtaaaattaccggattattctaaataaccaacacaaaacatcgattgtgcaataacgtacatcgatgtttttttcacaaacttttcaaggctagcgggttgaagttattgatatactgctatgtgaacttaatcgttttcttgtgaaattataaaataaggactacagtagaggtatatcgttttataagtttaattaggtagaggtgaatgactaatggaagagaaactacatggcgcagatattgttattgatagtttgagaaaacacggggttaatctcgtctttggtattcccggagcgaagattgatcgtttgtttgaaggactagatggtcaagacagtgaagatgcacctaaattaattgttacccggcatgagcaaaatgcggcgtttatggcccaagcttatggtcgcttaaccggaaaaacaggggtcgcgatcactacatctggcccaggagttggtaatttagcaactgggatcatgacagccaacgcagaaggagatccaatgttagcgattgggggacaagtacaacggaaagaccttcaccgctcaacccaccaaagcacgccttcaactgaaattatggcaccgattacgcaatatagcgctgaaattcaagaccctaataatatttcagaaattatggccaatgcatttgaagcgagtcaggatgcacgtaagggagcagctttcgttagtcttccacaagacgttgatgatgctgaggtaactgaaaagccattgccaatttatgaaacacctaagacgggtcctgctgatccaaatgacttacaaaaactagtcgaactaattaaaaatagtaaaatgccggttatcttagtcggtcaacggggcgcggatgaagaaattacgactgctatccgcaaattattaagtgattattcattgcctgttgttgaaacatatcaagcggctggagtagtatcacgtgacttagaacaacagtcatactttggacggattggccttttccgtaatcaagtaggagatcagcttcttcaacaaagcgaccttgttattgctgttggttatgatccgattgaatatgaaccacggaactggaacaaggaggggaatctgcgaattgtaaaccttgataccttgccagcgcaaattgataaccactatacgccaatcatgcaactagttggtaatattgctataagcttaacggagcttgataagttactaaaagggtatgaatatcctgttgcagccactgagcaactcgctaagtataagcaagaacttgaccaagataaaaagattcaagtaccaacaagcaatgatgccagccatccgttagcagttgtgcatgcaattcaagaaaatgttactgatgatatgcacgttgcgctcgatgtgggttcccactatatctggatggcacgacatttccgctgctaccagccacgacacttgttaatcagtaacgggatgcaaacactaggcgttggcttgccatgggcgatggttgcagcgatgctttatcccgaatataaatcagtggcagtttgcggggatggaggcttcctcttctctggggcggaattagcgacagccgttcaacaccatcttaatgttgtaacgattgtatggaatgatggcggtcattacgacatggttaagttccaggaagagatgaagtattcgcaagcagctggtgttaaatttggaaatgttgatatcgttaagtatgctgagagttttggtgcaactggactgcgagtaaataagccggctgaccttactaaggtactcagtcaagcgtttaatattgacggcccagttgtggtagatgtgccagttgattacagtaataataaagaattagctgccaacttgattgattcacaacttggctaagaggagaacaaagattatgacaacattatatgaacacggaacgttagctgcgttgatggcaggaaattttgatggcacaattactgtcggtaatttgctaaaacatggttcgatgggaatcggtacttttactggcttagacggtgaggttgttatcctgaataatgaagtgtaccaggccgtttcaagtggtcaagttaaccacattacagatatggatgctacaatgccatttgcttcagtccattttcctgctgaacaacaggatataacattaaggaatataaactttgctaaactgaataatgattttgttaaagaacatcagcttactaatgtttttgcattcttacaattgagtggtgagtttaagcacgtcaaaattcggattgctccgaagcaagaaaagccatacccgactttactcgatgttgcgcaacaccagcctgaatttgcggctgataatatcgcagggacaatcatcggctactatgcgccagaaatctttggaacaataacggcagcgggatggcaccttcactttatcagtgatgatcgacaatttgctggtcaccttctggcgtttgatgccccagaattaacaggtagctttgaaatttttgataacctggaacaacatctgccgattcataatcaagaatttcgggagagtacagttgatatggcaactttacgtgatggaattgctaaatcagaaggaaatgcagactaaagaacaaatgaagcagcggtataaataacgccgaaaaagggctccagtgctcggtaacgaactctggaaccctttttgtgatttctaaaatatcattttaagttgtcgtttttaatgagttgattaattagtagtcgcttggaaaaataatatttgcagatttacggagacggtatagagtcatattaacaattttagctagttcaatccatcgttgataattatcctgctgctgtggcgattcggggttagtaaagagttgtgcaaaatcgtttaactcgtcaaacatggtgttatctaagtagtggttattgataacttgaatactcccctgattattaagataagtcactttcttagtatcgaaaatactgtcaattattagcgtgtcgcgaagcctatatttattgccaaatgcttctgcggtgctaagcttacgggaatacacaacagtaagttaatatttccaagtatcttgtgctgcatgaatcatctagtcaaaaatagtatgggttccaataattcctaatcgtaacataagctagatttcctggttagccattttgtagatttataccatgtcatcataataaagaactttctgatcccttgtgcccaccggtagcattaggacatgattgtgacatttccatttctgcttggcaggtatttcaatagtgctttttacactaaatacctaaaccctgttttaaaaaatcgttcagttgaagttttggtgattcaagaatctaacccgaccggcaaaaattcattaccttactccaccagctaacagatgtggcggaccagcctgataagtaattttaaatccgcaatctcctttcacaagcttggttgacactaattgctgaaattaagtttcaagaacaacaccagcaattgacggttatcccacgtgaacgcagcaaaaatattttagcgtatttgcacaaacactatgcggaaaaggtaacaattaatgatagtgcaactgcggtcaatattagtcccaaagaatgtattcggtcatttaagaaaaacattcaccaaacgccaattgaatacttattaaattaccgggttgagcaggcaaagaaaatattgcggcattcggagctttcgatcacggatattgctttgcgggcgggatttagtacgagtgcctattttagtaaaatatttaaggaacgggtaggaatgacactacgggaataccggcagcgtcaagggtagcttactttaagtttaaaattttacttatcaatgtttccatgtctgctgggttaatgactttttcttggcgcggcgtttggtctactaacgcttggacaccatcgctaagctgatctcccagaagatcatgtaactgttgaagagcaggaagcccgatttgactaactttttggttggttagtgcgtggtagacggtttcagggaatttatatggactggcagttgacacgataactgtgggagttgtgtcatggctttgttgctgatattgatgtgttacatgtgatgccactgcagtatgcgggtcaataacatatccatcatttaaatatactcgtttaatttcggcttcaacttcatctggggtcgcaaaaccagccacaaattgctcctgaagcttatttaatacggtggaatctacctggtagtgaccgtcagtagctaattgcttcattaatttagcaactgttacgcagctttcatcataaagatcaaagaggagccgctcaagattacttgatactaaaatatccattgctggtgagttagttaggtaaaagttgcgtcgccgctcatattttccgctcttgaaaaagtcggtcaatacattgtttttattagaagcacacaagagcttgttaattggtaagcctaattttttagcgtagtaaccagcgaggatatcgccaaaattaccagtcggcacggtgaaattaactttctcccctagttggatcccgcctgtatgaacaagctgtccgtatgcagcaaaatagtacacaatttgggggataagccgcccgatattcattgaattagctgaggaaaagcagttattattttgcgcaaggcggtcattaaatgcttgatcgttgaaaatatgtttaacgcttgtttgggcatcatcaaaattacccttaattgcgattacgtggaggtttgatccaggctgccccagcatttggcgtaattgaaccggactaaccccgccagcagggtagaagacgattacctgtgtgtctttttgattgctaaaccctcgcattgcggctgttccagtatcaccagaagttgcggtgaggataacgatttgtttttctagttgggtgttttgtgcagcacgtgacactaattggggtaacatttgtaaggcgatatccttaaatgccagtgtcggcccgtgaaaaagttcaagataataattgctggcgtgtttgggcgttaatggggcaattaaacggttatcccactgactaccataagcggtatttgcatttttcagtagttggtcgctcgtaaattcatcaaaaaaccagttaagaatagttgcagcaagttgttggtacggcaacgaaattaaggttgcaaggttataagttggttgaggaaaatgaagcggtacataaagaccgccgtctggagaaagtccttgtaagatagcagttggtgattttaaaatcgttgataagtctccctgagtgctacggtagtccatgataattcctccaatttcaaaggtgattttattttaattgtatgtttcttatatgctatggtacaatgctgaaaatgaaaaaacaatgagaaactgaggcgggaaaatgaaaaacattaaactgggactgctcggtctgggtacggtcgggtcaggagtcttacagatggttcaacaaaatgcagataaaattctcgatgttactgggtgcaagttaacagttaaaacagctttagttcgaaaccttggtaactataataagtatgctgatgaaacttctttaacaactgattttgatgaaatcttgaatgatgatgaaataaaaattgtcgttgaacttatgggtggtattcatccggctaaagaatatattacaaccttattaaaaagtcataagaacgtggtcacagcgaacaaggatttgattgcgtcttatggcccagaattgatgactgtcgcgcatgaaaatcactgtgacttaatgtttgaagcgagtgtggctggtgggattcctattttgcggacgattgctaatagctttacggcagataaggttactgaagtaaagggaattgtaaatggaacaacgaattacatcttaacgcaaatgagccagcggggatggtcataccaccaagcacttgcccaagcacaacagctgggatttgcagagagtgatccaaccaatgacgtgacgggtaaggatgcggcttacaagatgattatattaagtcaatttgcatttggaactcaactagatattaaggacattgcggtagaagggattgaccgattgaatgacgctgatgttcaacaagcagcgtcatttggatacgtaattaaattactagggattaccaagctggttaataatggagtatttgtcgaagttggcccagtgttaatcccccgtgatcatcctttagcaacaatcaataatgaatttaatgcagtaatggttacagcccaagcagtcggtgatacgctcttctatggccgcggtgcagggggcttgccaactgctaacagtgtgttaagtgatattacaacggtaacgaaaaacattatcctgggaactaatgggaatctctttaataattaccaacaaccttatattccggcaaaacttgctgatataaaatatccatattatttatcgttaaccttgccggatgttcctgggcaaatgttgaagctaacccagatgatgacggatattaatgctagttttcgtgaaataacccaaacaaaagatggcaaaattgcgcacattgcaatcattactcaccggatgagcaaagaacaattacagacattactaactaaagtagctaatgatcagtcaattaacttgtcggcggcttataaagtgatgggataggaggaagtataatgattattcaagcacctgcttccagtgctaatcttggcccgggatttgactcgattgggattgcagtctctttgtatttaaaattagaagtccttggtccaagcgataactggcaagttgatcaccagcttgggaagctccctcatgatgagacgaatatgattgtaacaacggcattaagtgttgcaccggatttgctgccacagcacctgcaggtagtcagtgaaattccgatagcacatggattaggaagtagttcaagcgcaattgttgctggaatcgaattagcaaatcagcttaagaacctgaaccttagcaaggaagaaaaagttgagattgccagccagattgaaggccatcctgataatgtcgcaccgactattctagggggattagtagtggggacacatattaatgggcatttttctgcgattgaagcgcccttattcccctatgcttttgctgcatatatcccgccttataatctaaaaacagctgatgcgcgagctgccttgccatatcaactagaatattcccaagctgttcatgcgagcgcggttgctaatacctttgttgctagtttgtttgctaaaaactatgatgtagcgtttaaattaatggaggcagatcgctttcatgaaccatatcgcaaagagctagttccagaattagatcaaattcgtgaattaggaaaaaaacatggagcactagcaacatatttaagcggcgccggaccaacagtaatgacagttatcgataatgacaattacggattatttgaacaggcagtgcatgctgcggggctaaagggaaaagtagtccgtttacacccagatgttgaaggagttaaactaatataatttaggaaagaggctggaaatggattcggccttttttcttttttatgaattttaacgaactattttatgttttaactttattaagttcgatttttacattgaattataaaaaaatctttgctatccttaaagcagatttgaggaggcattgttatgagtgatattagtgtagtaatgggcagtaaatcagactggccaactgttaaagaaacttgtgatattttagatgaatttggcgtttcatatgaaaagaacgtgatttctgctcatcggatgccaaatgaaatgttcgcgtttgcgcaaaatgcggttgataatggggtcaaagtaataattgcatgtgccgggggagcagcccatcttcccggaatgattgcggcaaatacccccctgccagtaattgggatcccaggacagacaaaagctcttggtggcatggactcgcttttatcaattgttcaaatgccagcgggaattccggtggcaaccactgcgattggaaaagcaggcgctaaaaatgcagcgttattagcattgcaaattcttgggatcacagataagcatatccaacaacaaattatcgaatatcgacaggcgatgcatgatcaagcaaaagaaagtgggcagtatcttgaataaatttattccacaaggctcaactattggcattattggtggtggccaattgggacagatgatggcattggatgccaaacagacggggatgaaggttattattttagatccgacaccaaattgtccagcggggcaggttgctgatgaacaaattgttgctccttatgccgatactaaagcgattgaaaagttagctgataaagcggatgtattaacctacgaatttgaaaatgttgatttaaacgctttggaagatgtacaggatcgcgtttatcttccccagggaactaatttgctttacacgaccaaaaatcgtttacgggaaaagaatttcttacgtcaggcaggggtaaaaacagcacctttcatggaagtgcatacttctgctgaattaaaagatgcagtaaagaaaatcggttacccagcagttttgaaaactagtgaagggggatatgacggacacggtcaagaagtattacgtaataaggatgacctcgataagtgtgcgtctattttagccactggcgactgtatcttagaaggctgggttccttttaaccgcgaatgttcagtaatggttggacgtaatgaagatggagaaataacggcttttcctgtttcagaaaatattcaccatgatgaaattctacatttaagtattgtcccagcaagaatctcttctgaattacaacaaaaggcgcaaaaaatagcggtgcagattgcccaagcgattaatttgcgagggattttaggggttgaaatgtttgtaacagatgatggagagatctatattaatgagcttgctcctcgtcctcacaattctggtcattattcaattgaagcttgtaacttttcacagttcgccatccataatcgagcaatttgtaactggccactcccacaagtagagttattaaagccggtggtaatggtaaatgttttaggtcagcatgttaatggagtccgacaacagattcagaaaaaggcaaattggcattttcatgattatgggaaagcagaagttcgtcataaccggaaaatgggccacgttacaatcttgactgatgatattgaagctactttagcagaaattgacaatacaggtatctggggtgcataaagttcggctttacgtaaccgcttttcctgtgcgataatacatttagaaaaaatagagaggatttttaactgatgattgatcgttataccagtccagagatgaaaaagatttggagcttagaaacacaataccaatgttggttagatgttgagattgctgctgatgaagcgtggagtaagcttgggcatattccagcagaagatgtggaaaagattaaaaagaatgccaagttttctgtggagggaattgcagagattgaagcagtgactcatcatgatgtgattgcttttacccgtgatgtttctaaatcattggggcctgaacgaaagtgggttcactacggaatgacgagtacagatgtagttgatactgcacaaggcttgcgattaaaaaaggcgaacgatatccttcgtcaagatattgataactttatggatgtccttaaagaattagctgaaaaatataagtacacagtttgtatgggacgaacacatggtatccatgctgaaccaacaacttttggcttgaaagctgctcggtggtattcagaaatgaagcgtaataaagaacgttttgaacatgctgctaagggtgtcgaagcgggtaaaatttctggtgcagtaggaacttttgctgaaattgacccatttgttgaggaatatgtctgcaaaaaacttggcttacgtcctcaagaaatctccacacaagttcttccgcgagatttacatgctgaatatattgctaccattgcgcttattggaacaagtatggaagaaatggcaaccgagattcgctctcttcaacgaacggaaatccatgaagtcgaagaacactttgccaagggacaaaaaggatcttctgctatgccacataagcgtaatccaattggctcagaaaacattactggttgtgcgcggatgctccgtggctttatggtgcctgcttatgaagatgtttcgctttggcatgaacgggatatttctcattccagtgcagagagaatgattttaccagatgcaacttcattacttgattacatgttgcggcgttttggtcgaatcttaaagaatctcgatgtattccctgaaacaatgaagaagaatatggacaagacattgggcttaatttacagtggtcgggttcttttgaagttggttaacagtggaatgactcgggaagcagcttatgatttgattcaaccatataccgctaagtgctgggcagaacagattccgttccgtccattattggaagatgacccaacaattcaaaagcaattaactaaagaagatcttgatgatgcctttgattaccactggcacctccgccatgttgatgacatttataaaaggttgggattagactaatttaagttagtttaagaggctagacgaacaaaaaagtttgcctagcctttttattatgctttgtttagtaaaacacgaacaatttgaactgaaaatcatataaatatcgtaattcgtattgacaatcgggagggggaaagagtatattgttgtcatgaaatatcgaattaattttcggatattaaaataaatgttcgttttttactgaaaggaagttccgtaaatggagaagttattgtataccggcaaggcaaagcagatgtggcaaactgaggatccagcggttttacgagtagtttatctggaccaagctaccgccctcaacggaaaaaagaaggatcactttactggtaagggtaaggctgccaatgctatttcttccctcgtttttggttacttaatgaagcaaggaattgagacccactttattaagaaactatcaactaacgaagaccttgtaaaaaaatgtgagatgttcccgcttgaatttgtaacgcggaatgtaattgctggccattttgcaagtcggtatggactttcagaaggggaagagcttccttcaccagttgaggaaacgttctataaaagcgatgagcttaatgatccctttatcaatgaatccgcaacgattgctcttgagattgccagcaaagaggagcttgcgcaaatgtgggggatctgtcggaaggtcaataacttacttaaaccattatttgccaaagctaatttacggttggttgacttcaaactcgaatttggccgtttaagtgatggcaagattattcttgcagatgaattttcgccagataactgtcggttatgggatctgacaactatgcagcatatggataaagacgtatatcgacgcaaacttgctgatttaacccaaacatatgatgaggtattggaacggttagaagcagtgatgaaggaggaagcataaatggttaacgttcggattttcgtaacatataagcaatcagtctttgatccgcagggagaaacaattaaggatgcgatccattctctaggtcatgatgaagtaactgccgttaaagttggaaaattttttgacgttaccttggatacaaatgaggatgaggtagcaacggcagtaaaagaaattgccgatcagctccttgttaatttcaatatggaaacttatacataccaagttatggaggaagcctagatgaaaattgcggtggttgtttttccaggatccaattgcgatgtggatttatatgaagcccttcattccgtttgtcatgcagatgtggagtatgtttctcaccggcaaaaaagtttagctggttttgatgctgtgatgttaccaggaggattttcctatggtgattatctacgagctggcgcaattgctcggtttaccaatatcatgcctgcaataatcaaaatggcaaatgagggtaaaccagtctttggaacgtgtaacggatttcaaattttgacagaagcaggtcttttgccaggtggactcaaacgcaatgatagccaacgctttgtttgtaaaactgttcctttagaagtagtgaactcgcaaactctttttactagtcattaccaggatcacgaacgaatcgcattaccaattgcgcatgccgatggtagttactatgcagatgaaaaaacattagatgaactggaagcaaataatcaaattgtttttcgttacgcgactgaaaatccaaatggtagtttacgcaacattgctggaattactaataagcacggaaatgtcttaggcatgatgccccatcctgaacgggcagtagaaactattcttggcagtacggatggcttacggttatttgaatccttgttagaaaacggcagaattaaagtggaggcatagttaatgaagcaagcaatgaccccagaagagattaaagaaaagaaaccatacttagattggagcttgacagaagcagaatatgattacattcgtacccagctcttggggcgattaccaaattatactgaaactggcttattttctgcgatgtggagtgagcactgttcatataaaaagtcaaagccggttctgcgtctcttccctaataaaaatgagcgagtattgcaaggtcccggagaaggagcaggggttgttgatattgatgatggacaagcggtggtattcaaagctgaaagtcacaatcatccgacaactgttgaaccttatcaaggagcagcaaccggtgtcggtggaatcctgcgagatattttcagcatgggggcacgaccaatcgcttcccttgattccctccatttcggtgaattagataattcgacaacgcggatgaaagtaactaataccgttcggggaattggtgattacggtaattgtatgggaattcctacaattgcgggtgaaacaacatttgatccatgctaccagggcaatattctgtgtaatgcaatgagtgtcggcttaatggaccagaaagatatccagcagggtcgcgctgccggaattggaaatgcagtgatgtatgtcggcgctaaaaccggccgtgatggaattcatggcgccacctttgcttccgcagactttaatgatgaaaatacgacgcaacgttcggcggttcaagttggtaatccttttatggaaaaactcttattagaagcctgtcttgaccttattagaaatcatccagactggttagtaggaatccaagatatgggggcagcagggattgtttcttcaagtgcggaaatggcttccgaaggtaaaagtggaatggagctaaatttggatcttgttccgcaacgtgaacccgggatgtcggcttatgaaattatgcttagtgaatcccaagaacggatgctactttgcgtaaaaaaaggtcatgaagaagatgtcaaaaagatttttgatttttacgatcttgaagcggtcacaattggccggattactgcgggtcatgattatgttctctttcatgatggtgaagaagtatgtcatatcccagtgtcgagtttaacggatgacgtactagaagaagaaagcctcgaaaaaaagcctgcgcggattgaattagccgagcagcagccagcgtggattccagatgttgataacgttgctgaagttttaactgccttgcttgctcagtcaacgattgcggataaaagtagtctttatcagcaatatgattctcaagtacggacaaacacagtggctgggcccgggagtgatgctggagttctgcggattcgtggaacacataaagggttagcgatgacaactgatgggaacggtcggtttgtttaccttagtccagaagttggtggacaaattgccttagttgaagcagctgccaacataattgccagtggagctgagccgttagcaattactgactgcttaaattatggtgacccaactgatccagaaattttctgggaacttcatcaatctgttcaagggatggctgatgcttgccgtgaatttaatactccggttatttctgggaatgtttctttatataacgaaaacaatgggcaagcaattcatccgacgccgatggttggaatggttggtctaattaaaaatattgatcgcgtaattccttcgtttgtccaatacccgggagataaggtttatctagtgggccaaactcgtgatgattatgcggggtctgagttgcaaaaaatgatgaccggcgatattagcggaattgttaagtcatttgaccttcaccatgttcatcaatatatgcaacgtttactgacgacgatggagaacggccttgtttccagtgcccatgatttgagtgaaggtggtctcggagtagccttagcagaaacggtcttcaaaactgatttagggttgaaagttgactttgctgatcagccagcagttcgcctgtttagtgagactcctggaagatttatcgtgacggttgctcctgaaaaggcaaccgaattcgaacaggcattaggaaaagatgcacacctaattggagaagttacaaatagccactggttaatggttaaactggcaaatggtgaactcaatgaaagtgttgcaaaattacaaaaaacatgggaggaggcaattccgtgccaactgaaatcaaaggattaaatgaagaatgtggggtctttggggtttttgatgcggctaacgctagtcaattaacctattacggcctgcatactcttcaacatcgcggccaagaaggagccggtattgtctcaactgatggaacggaactttatcagcaccgtgaccgaggattgttggcgaaagtgtttgctgatccggctgagcttaaacgattaaaaggaaacgctgcgattggccatgtgcgttatgggacaagtggacataactcgatttccaatgttcaacccttcctttttcactttcatgatggcgccgttgcccttgcccataatggtaatttaactaatgctgttacccttcgtcgtgaattggaaaatgaaggggcagttttccagtcagattctgatacggaaattttaattcaccttatccggaaatatattaatgaaggttttattcctgctttgaagaaaagcctcaaccttgtccatggtggatttgcctacctattactgcaaaaagatcggttgattgcggctttggatcctaatgggattcgtcctttatgtattggaaggttagaaaatggtgcttatgttgttgctagtgagacttgtgctttagatattattagtgctcaatttgtgcgtgatgttttgccaggagaattaatagttattgataaaaatgggttacatattgaccattacactacccaaactcagctggcaatttgctcaatggagtatatctattttgcccgtcctgattctattattcatggggtaacggtacataatgcgcggaaacgaatgggaaagttattagcaaaggaacatccggttgatgctgatatggtgattggagtacctaactcatcgttgtctgctgctagtggatatgctgaagaaagtggccttccatatgaaatggggttaataaagagccaatatgttgcgcgaacgtttattcaaccaactcaagagttacgggagttaggcgttcatatgaaactgtcagctgtccgcggagttgtaaaaggaaaaagagtggtagtagtcgacgattcgattgtgcgcggaacaacttctaagcagattgtccaaatgctaaaaagagctggggctaaagaaattcatatgcttatttcctcaccaccatttaagtttccgtgtttctatgggattgacgtatcaacgcgttcagaactgatggctgctcattactccattgaagaaatgcggcagttaattggtgcagattctcttaactttttgagtattgatagtttaatcaaagcaattaacgtaccagatgcaggagatgctcctaatggtggacttaccgtggcttattttgatgggaagtacccaacgccactttatgattatgaagaagggtacttaaagtcgttaagcgaacaagagcgattagcaagaaaggggtaagaggatgagtcgttatcaagatgcaggggtggatgtaaatgccgggtacgaacttgttcaccgtattaaagatgcagtcaaatcaactgatcgcccaggggtgattgggggaattggcagctttggggggatgtttgacttagaaaaattacaggtacggcatccggtccttgtctctggcactgatggtgtgggaacgaaactcttaattgcccaacaaatgaataagcacgatacaatcgggatcgatgttgtcgcaatgtgcgttaatgatgtcttggcgcagggagcggaaccaataacatttctcgactacattgcgaccggccataatgatccggctaagatggcagcgattgttagcggagtagcgactggttgccgagaagctggagccgctttaattggtggagaaacagcagaaatgccagatatgtatgcagccaatgagtatgacctggcaggaacagtaacagggatagcagaaaaagaagaacttcttaccgctgctggaccgcaaaaaggtgatattttacttggcctcccatcaagtggcttgcattccaatggcttttcccttgtccggcagatcttatttaaggataatcacgtcaaattaactgatcgcccagaagccttgagaggaaagacggtaggagaaacgatcctgactcctactaggatttatgttcaagcggtcttgccattagtccatcgcaaattggttcatgggattagccatattactggtggaggattgattgaaaatgttccccggatgttagaagataacttgcaagcggtgattgatcctggtcggtggccacagcttccggtctttgactatttgcgggtgctaggaggccttactaaggaagattgtttcgaagcatttaacatgggaataggaatggtcttagcagtagcaccagatcaagtagcacaagttcaagagatactatcaaataaaaacatgacaagttatcaaattggttatcttcgtcattgtttaccagatacaaaaaagattgttatcaagtgagggttgtaaatgagagtcgcaattttagcatcaggaaacggaacgaattttgaagtcttagcacagcacttcaaaaataatgatcttcctggtgaattagcattattattctgtaatcatccagatgctccggtaatgaaaagagctgcccgactggggattccggcagaaagctttacggtcaaatcttgtgggggaaaacaggaatacgaggaaaaattattgggagtgttgaaaaagtatcaaattgactttattgcccttgctggttatttacgagtaattgggcccactattttggatcattatgctcaccaaattattaaccttcatccagcatggttgccagaatatccgggactacattcgattgaacgggcatttgctgatcaacaagcccagacaggcgtcaccgtacactatattgatgcgggactcgattccggcccaattatcgcccaggaacacgtcccaattttaccaactgatactattgaaaccttagaagcacgggttcatgaaactgagcaccggttatatcctgaagcactaaagcaggcattagaaaaggagcaacattaaattatgaaaagagcattagtaagcgtttctgataagcaaaacctggtcccattcgttaaaggattagttgaaaatggttttgaaattatctcgactggtgggacgaagcgggttttagatgaagcgggaattgaaacaattgggattgaggatgttactcattttccggaaattcttgatggccgcgtaaagactcttaacccatacgtccatgggggactattggctcgccgggacttaccggaacacatggcgaccctcgaaaaacttaatattacgccaatcgatttagtctgtgttaatctttatccatttaaagagacgatcgaaaagccgggagtggaattagccgatgcaattgaaaatattgatattggtggtcctagcatggtccgctcagctgctaaaaactatcatgatgtaacaatcgtggtggaccaagccgattacgatgaagtcttagcccaaatcaaagaagatggtgaaacatcattagcaactcgagcacgcttagcagcgaaagcctttcgtcatacggcagcctatgattccctcatctctcaatacctcacaaaacagacagggcttgaagatccagaaaaattaactttaagctgggatttaaaagaaacaatgcgttatggtgaaaatagtcaccaaaaggcttggttatatgaagacgcgcttcctaaggctttttcagttttacaggctaaacaattacatggtaagaagctttcctacaataatattaaagatgctgatgaagcattacggtgcattcgcgaatttgatgaaccaacagttgtagcgatgaaacatatgaacccatgtggcattggccgaggggatagtttggttcaagcttgggatcgtgcctatgaagctgaccctgtttctatttttgggggagtgattgctcttaatcggcaagttgatttagctaccgccgagaaaatgcacaaaatctttttagaaattgtcattgcacccggctttgacgatgatgcatttgagttattggcaaagaagaaaaatattcgtttgttgagtctggactttagtaagaaggatgaaccaactaaacatgaagttgtttcagtgatgggtggaatgttgttgcaggaacaagacacgcttaaggaagattaccacgactggcaatgtgttactgaaaagcaaccaacagaggaacagcttaagacattaatgtttgcctggaaagcagttaagcatgccaaatcaaatgcgattgtcttagcaaatgatgagcggacattaggggtcggagaaggtcaacctaaccgaattgattcattgaaaattgccgtaaaacatgctggcgaggcgattgatgaccggacagtgatggcatcggatgctttcttcccatttggtgattgtgttgaatatgcgggtcaaaatggcattaaggcgattgttcagccaggaggatcaattcgcgatcaagaatcaattgagatggcaaataagtacggaattgcaatggtcacaacaggcattcgtcatttccgccattaaagctaggagggtatcatggaaaagcaggtcaacgtattagttgtaggtgaaggcggtcgtgaatttgccgtggcgaaaaaattacaagaaagtccccgtgttaagcaagtttattgtgcgccaggcaacgtggggatgtcgactgtaggagtagttcccattgcaattgcggaaactgactttgctaagctgattcaatttgctaaagaacataatgtcgcgtggacattcgtgggccctgaggattgcttggttgatgggattgttgatgaatttaaggccgctggattaaaggtttttggtcctgatgcgcgggctgcccaattagaaggctcgaaagactatgcccttaattttatgaataattatcacgttcccactgcccgccatgcgacatatagggatcaaacagcagcgattaataacgttgggcaatttggctttccagtagtaattaaagaaaatggtttagctggaggaaaaggggttgtcattgcaaaagatcgtgcagaagcaattaagacaatcaaagaaatgtttgtcaatggtcaggcgcgccttgtgattgaagaatgtctatcaggtcctgaatattcaatgtttgttttgattagtaatggccactaccgaattttgcccatggctcaagaccacaagcgagcatttgatgacgataaaggtcctaatactggggggatgggggcttatagtcccttgccacaactttcctcagccgttcgtcaacagatgattgatgaagtacttaagccaacaattgatggtttggtggctggcgagtatcactaccatgggattttatatattggccttattttgactgataatggtccaaaagtgattgaatataatgttcgtctaggtgatccagagacccaggtgattttgccccgcatgaaaaccgacttgttcgaacttgtagacgcagcaattaatgatcgaccattaccagaagttgaagaaaatgaagatgcttgttttggtgttgttttggcatcgaaagggtatccaactaagccaatccacggccaaaagctgggaacatttccagttgatcctaatgttactattgattacgcaaatgttgctggaacaattaatgacttaaaaggtgcaggtgggcgtttgctaatggtgatcgggaaagatgattctcttcaaaaagcccgcgatcacgtttatggctacttgcgccagcttgatgaacctgaatgtttttatcgtcatgatattggtgcaaaagctggactgcaataatttcttcatcactattggcatttgcaggggaatggattaaaataatatggtaatgctgtttatagcgattttaagaagaaagaggtcaattgaacatggctaaattagtattaattcgtcacggtcaaagtgaatggaacttatctaaccaatttactggttgggttgatgttgatttaagtgaaaagggtgttgaacaagcaaagaatgctggtaaagcccttaaggaacacggcattgaatttgactacgcatacacttctgttttgaagcgtgctatcaagactttgcactatgctcttgaagaatgtgaccaattatggatccctgaatacaagacttggcgtttaaacgaacgtcactatggtgcacttcaaggccacaacaagcaaaaggccgctgaaaagtatggtgacgaacaagttcacatttggcgtcgttcatacgatgtattacctccattgctaagcgctgacgatgaaggttctgctgcaaaggatcgtcgttacgctaacttagacccacgtgctattcctggtggtgaaaacttaaaggttactttggaacgtgttattccattatggcaagatgaaattgcgccaaagcttttggacaacaagaacgttatcatcgctgcccacggtaactctcttcgtgcattgagcaagtacatcgaaaacatttctgatgaagacatcatgaaccttgaaatggctactggtcaaccggttgtttacgacttcgatgacaagcttaacgtattaagcaaggaaaagtactaaaataaacttacgatattaaatttgaagaggcgggaaagttagattcctaacgccttttttttgtagcttttttgaagaaatgttgaagatattgatgaataaattgagcttatagtgagttgtggtatgattaacatcagaatctaataaggtggagagaatttaaatgaaaatggaaaaacaacgaacactcccaatgaaggaattttacctttcattgaaacaactggtaaagcctaactatttaaaggcaatgtggccagttgcaggggtatcaattatttttattgctttagcagcgatcttagcactccttaattcaaacattgctgcctcattgagtatgacgatgatgatggtaatgtacgggatggcttccccggttgcaatcttgttctcattattagaaattgtagggattgtcgcaattattgctgcgttagccttcttctatactttctttgcagttgctacccaatatacatatcaggataagatggctcatccagaacaaccagttagtgctggatcaatatggatgcactataagcacttgcgaaaaaaccaagtatggcggattattctttacattggattgtttactttcttatggagtttgcccctcaacattgttaacgcattactcttgccacatttatccggagtagccgctgtttatacggggtgggcaattcgcatccttaatgatattgtcgtattatggaagagtattgaatattctcaatcatacttcctttatcgtgaaaagcagccacaattccttagccaatcaatgcgttatgctttaactgctagtcggcggttcatgactggtcgaaagtggaactactttgcaattctgtttattttagaattccttccaatgtttatctggactttaatttttggtggattggcattttacggcgtttatacggcaacttatgtccttacttatatcggaatcgttttagtggttgttggtatttcctgctaccttccagtggtatatgcaattcttgctttgtactacaacaaggctcgagcaggaatggaaatggatgtgctttttaaggatacttttaagccagtagccgaattaaccggtgaagcttatgttcatgaagtatatgtagaaaaacaaccaaaagaacaaccatcaccaactgttaagcgtgatgatgaaaagaaacacgaagcaaaaaaagatgaatagtgaagcgaaaagctgaagggtaacgaaaactcttcagcttttttgtattttaaatacttcttgacagtaatcattaattccatgtacaatgacggcaataaccaaagatgaagaagtaatcttagtagtaagcggttggacatttaggaagcaagtggtaactgtaaactttgccaatgccgttatacgaattacacttacggagtctttcagtatttgaacggatcgtctcgttatcgactagagtggtagctatttagctgcaaatcaaggtggtaacgcggtaaatcgtccctgacttcattatttgaagttggggattttttgtatccgagaaatttatggaggtaaacatggatattcttaatgaactagaatggcgtggggctattaaccaagttacagacgaagaaggcctacgcaaattaacatcagaagataaaattgctctttactgtggaactgatccaaccggggatagtcttcatattggacacttaattccatttatgattttgaaacgatttcaattagctggccaccatccagtaattattattgggggaggaactggtgcaattggtgatccatccggtcgaaagtcagaacggcaacttcaaaccatggatcaagttcaccacaacgaagaagcattaactgctcaaatgaagaagttgttcggcactgaaaacttcacgattgtaaataactatgaatggttatcaaagatcagcttgttagactttcttcgtgactacggtaaactatttaatatcaacaccatgttaaataaggaagtagtagcaagccggttagatgctggtatttcatttactgagttcacttatcaaattcttcaatcagtcgatttccttcatctttaccgtcacaatgatgtgcaattacagattggcggctccgatcaatggggaaatatcactgccggaattgatttgattcataaggttgaaggaccagatactaaggtttacggacttactattccattaatgctcaaagctgatggaactaaatttggaaagaccgcgggtggtgcaatttggcttgatccagaaaagacctctccatacgaattttatcaattctggattaaccaagatgaccgtgacgttattaaatacttgaagtacttcactttcttatcaaaggaagaaattgatgacttggcagaaaaagttgagaaggaaccatggaagcgagaggctcaacgtcgcttagcccaagaagtaactaaatttgttcatggccaagaagcagttgaagaagcagaacggattagtaaagcattgttctctggggatgttactgacctttctgttgcagaaattgaacaaggctttaagaatatgccttcagtagatgtagaaaataagaaagaaaatattgttttatggttaaccgataatggcattgaatcttcacgtcgccaagctcggcaagatgtatcgagtggagctatcaggattaatggggaaaaagttgatgatgttgacgccgagattgatccccaagcacattttgatggtaagtttgtgattgttcgaaagggtaagaagcactattacttagctcgcgtaaaataaattagaccaattgttagcaaatacgttcttaaaagatgatttaagggcgtattttttatttttagatataaaaaaacaaattttttctatttcgaataataaaaaggttcaggtttaaaaaataaattaaaaaagttgaaaaaaggtgttgacgaaagaatgaaatccatgtatagtagttatcgttgtcaaaacagctaagtgctgttgagatggtttaacaaaaaagttaaaataattgttgacatcgacttggcaacatgatatattaataaagttgctgattgagttatcgatcaaaagaaattaaaaaataatttaaaatttcttcttgacaagttaatctgatacatgatataatgaaattgttgattggctgcttaattaaccgacaggtagacctttgaaaactgaacaaagtttcgacgaatcaaatgtgtagggtcttcaatcacgatgtgatttgaagcaaaacatttgcgaagtcaattcgcttaataacaaagataattgagagctattcaagttcttatatattttatatgagagtttgatcctggctcaggatgaacgccggcggtgtgcctaatacatgcaagtcgtacgcactggcccaactgattgatggtgcttgcacctgattgacgatggattaccagtgagtggcggacgggtgagtaacacgtaggtaacctgccccggagcgggggataacatttggaaacagatgctaataccgcataacaacaaaagccacatggcttttgtttgaaagatggctttggctatcactctgggatggacctgcggtgcattagctagttggtaaggtaacggcttaccaaggcgatgatgcatagccgagttgagagactgatcggccacaatggaactgagacacggtccatactcctacgggaggcagcagtagggaatcttccacaatgggcgcaagcctgatggagcaacaccgcgtgagtgaagaagggtttcggctcgtaaagctctgttgttggagaagaacgtgcgtgagagtaactgttcacgcagtgacggtatccaaccagaaagtcacggctaactacgtgccagcagccgcggtaatacgtaggtggcaagcgttatccggatttattgggcgtaaagcgagcgcaggcggttgcttaggtctgatgtgaaagccttcggcttaaccgaagaagtgcatcggaaaccgggcgacttgagtgcagaagaggacagtggaactccatgtgtagcggtggaatgcgtagatatatggaagaacaccagtggcgaaggcggctgtctggtctgcaactgacgctgaggctcgaaagcatgggtagcgaacaggattagataccctggtagtccatgccgtaaacgatgagtgctaggtgttggagggtttccgcccttcagtgccggagctaacgcattaagcactccgcctggggagtacgaccgcaaggttgaaactcaaaggaattgacggggcccgcacaagcggtggagcatgtggtttaattcgaagctacgcgaagaaccttaccaggtcttgacatcttgcgctaaccttagagataaggcgttcccttcggggacgcaatgacaggtggtgcatggtcgtcgtcagctcgtgtcgtgagatgttgggttaagtcccgcaacgagcgcaacccttgttactagttgccagcattaagttgggcactctagtgagactgccggtgacaaaccggaggaaggtggggacgacgtcagatcatcatgccccttatgacctgggctacacacgtgctacaatggacggtacaacgagtcgcaagctcgcgagagtaagctaatctcttaaagccgttctcagttcggactgtaggctgcaactcgcctacacgaagtcggaatcgctagtaatcgcggatcagcatgccgcggtgaatacgttcccgggccttgtacacaccgcccgtcacaccatgggagtttgtaacgcccaaagtcggtggcctaacctttatggagggagccgcctaaggcgggacagatgactggggtgaagtcgtaacaaggtagccgtaggagaacctgcggctggatcacctcctttctaaggaataaaacggaacctacacatcgaagaaactttgtttagttttgaggggtttaccctcagagcttgtactttgaaaactaaatactatctaatttctttattaacaaaacaataaaccgagaacaccgcgttatttgagttttaattaacgaattataatcgctaactcaattaatcagacaatctttgattgtttaggttaagttatgaagggcgcatggtgaatgccttggtactaggagccgatgaaggacgggactaacaccgatatgcttcggggagcggtaagtacgctttgatccggagatttccgaatggggcaacccaatcagcttagtcgctgattacttgactagtgaatacatagctagcaagaggtagacgcagtgaactgaaacatcttagtagctgcaggaagagaaagaaacatcgattccctgagtagcggcgagcgaaaagggaagagcccaaaccaacaagcttgcttgttggggttgtaggactgaatattagagttaccaaagtgcgacgtagtcgcaacagttgggaagctgtgccatagagggtgagagccccgtagacgaaacgtcacactctctgttcaggatcctgagtacggcgggacacgtgaaaccccgtcggaacccgcgaggaccatctcgcaaggctaaatactccctagtgaccgatagtgaaccagtaccgtgagggaaaggtgaaaagcaccccggaaggggagtgaaatagttcctgaaaccatgtgcctacaagctgtcggagcccgttaatgggtgacggcgtgcctcttgcagaatgaaccggcgagttacgattacatgcaaggttaaggtggaaaaaccggagccgtagcgaaagcgagtcttaaatgggcgtaaaaagtatgtagttgtagacccgaaaccaggtgacctacccatgtccaggttgaaggtgcggtaaagcgcactggaggaccgaacccgtgtcagttgaaaatggctgggatgaggtgtgggtagcggtgaaattccaaacgaacttggagatagctggttctctccgaaatctctttagggggagccttgaggtaaagaatcgtggaggtagagctactgtttggacaaggggcccgtcatgggttaccaacttcagataaactccgaatgccatcgatttatactcaggagtcagacgatgagtgataagatccaccgtcgaaaggggaacagcccagatcaccagttaaggtccctaaatatatgctaagtggaaaaggatgtggagttgcatagacaactaggatgttggcttagaagcagccaccatttaaagagtgcgtaatagctcactagtcgagtgatcctgcgccgaaaatgtaccggggctaagcatattaccgaaactgtggatgtgcactatgtgcacgtgataggagagcgttctaagggcggcgaagtcagaccgtgaggactggtggagcgcttagaagtgagaatgccggtatgagtagcgaaagacaggtgagaatcctgtccaccgaatgactaaggtttcctggggaaggctcgtcctcccagggtaagtcgggacctaagccgaggccgagaggcgtaggcgatggataacaggttgagattcctgtaccagttaactgcgtttgacgatggagggacgcaggaggctaagcaaaccgtacgactggaagagtacggccaagcagtaagtcaggatgtgagtcaaatgtttacatccgcgttgacaagctgtgatggggagcgaaattaaagtagcgaagttgccgatgtcacactgccgagaaaagcttctaaggagtagttaactgcccgtaccgcaaaccgacacaggtagtcgaggagagaatcctaaggtgagcgagagaactctcgttaaggaactcggcaaaatgaccccgtaacttcgggagaaggggtgctggccgcaaggccagccgcagtgaataggcccaggcgactgtttatcaaaaacacaggtttctgcaaaatcgtaagatgaagtataggggctgacgcctgcccggtgctggaaggttaaaaggatgggttagcttcggcgaagctcagaattgaagccccagtaaacggcggccgtaactataacggtcctaaggtagcgaaattccttgtcgggtaagttccgacccgcacgaaaggcgtaacgatctgggcgctgtctcaacgagagactcggtgaaattgaaatccctgtgaagatgcagggtacccgcgacaggacggaaagaccccatggagctttactgtagcttgatattgagtgtttgtactgcttgtacaggataggtaggagccgtagaagtcgggacgctagtttcgacagaggcgctggtgggatactacccttgcaatatgaccactctaacccgcagcactgaacgtgctgggagacagtgtcaggtgggcagtttgactggggcggtcgcctcctaaaaggtaacggaggcgcccaaaggttcgctcagtatggttggaaatcatgcgcagagtgtaaaggcacaagcgagcttgactgcgagacagacaggtcgagcagggacgaaagtcgggcttagtgatccggtggttccgtatggaagggccatcgctcaacggataaaagctaccctggggataacaggcttatctcccccaagagtccacatcgacggggaggtttggcacctcgatgtcggctcatcgcatcctggggctgtagtcggtcccaagggttgggctgttcgcccattaaagcggtacgcgagctgggttcagaacgtcgtgagacagttcggtccctatccgtcgcgggcgtaggaaatttgagaggacctgtccttagtacgagaggaccgggatggacataccgctggtgtaccagttgttccgccaggagcaccgctgggtagctatgtatggacgagataaacgctgaaagcatctaagtgtgaaactcgcctcgagatgagatttcccatttccttcgggaaagtaagacccctcagagatgatgaggtagataggatggaagtggaagtgccgtgaggcatggagcggaccattactaatcggtcgaggacttaaccaaggagcggtaaggtttattggaagagaatagataggatttagttttgagagcacaagctctcgtccgaagggacaaagagtgtggtgatgatggcttgaaggatacacctgttcccatgccgaacacagaagttaagcttcaacacgccgaaagtagttgggggatcgctccctgcgaggataggacgttgccatgcgatcaaaacgtgaaccggttaaacgattcgcgtcttttctttaataatagtttctggtataattaattaggaattgttattatgctgacttagctcagttggcagagcacgtcactagtaatgatgaggtcggaggttcgaatcctctagtcagcataattaaaacttacaaagtttattaatccttgatatatcaacgttttacgaagatgtattagggattatttttgtttatttaagaatgttatgcacacggctgtgcacacaaaataatcgtgtgcatgagcttgcatcggagaagtgcgtaaaccattgatatattaggctttatagattattttttgtgtgcatttaactgcttttgctatgatatagtgatgaggtcggatattcgaatcttctagtcagcactagatagtgtaggatagcctattataacgctgtttatggacgttataataggctattttatatacaaatatgttatcagtttctcacttttttctcacgtgaacactaaatggttgttttgaatttttgagaagtagcgctaatgcagttatatcaaccatttaagctgttagagtgtgtgaaaaagtgtgaaatgaagattaaaagtatatcgttaaaataatataaataattttagatattaagtatattgttttcttcagaaaatatagagaaaaattcaataagatgaagggctttgattttctaattaaagccttttaattataggttgaagaagaaagtttttaggatcaaatttggatagtatataaccatttttgaatattattcttatttaagcagatcacaatatgttataaaattaaaataagggtatgttatgagtgcaaataggagtaaaaaatggttaataaaaaagagttgtctgaagaagatgtaaaaacaagatatattactcctgctattgaggacaaaggatggactcctcaagactggcgtatggagtatgagtacacggatggaagaattactgttgttaacaatacaaccaaacgtggagaacgtaagaaaatagattatctattaaattatcatgaaaatgttcctttggctattattgaagctaaagacttgaaacatacatacgatcatggtatgcagcaaggaattgactatgctgaagggttaaaacatgctgaatccttacaagtaccttttgtgtatgctagtaatggagaggcatttcttgaacatgatatgctaacgggtaaagaacgtaagttagcaatgaatgaatttccaactaaagaagaattatgggaacggtttaagcaagaaaagggattaacccctaaacagatcaaagtaattaatgaaccatattattcaacacgtgaatcaagaaagccaaggtattaccaaagaattgcaattaaccggtcagtgaacgcaattgctaatggtcaacgtcgggtaatgttagttatggctactggaactggaaagacttttactgcctttcagatagtttatcggttattacaatctgggattaagaagcgtgtattataccttgctgatcgtaatattctggttgatcaagcaatgacagatgattttagcccgttgctaagtaaagcaactaaagtacgaaatggaaaaatggatagttcttaccaaattcattttgctttatatcaacaattagcaggtcgtgaagaagatgctgggcatgaacctttccgtcaattcaaacgtgatttctttgatttagtagtgattgacgaagcccatcgtggctccgctaaaaaggacagtcagtggagaaaaatattagattactttgatggccctaatgtgacccattttggtatgactgctacacctaaaaatgagaagggtgcatctaatattgattattttggtgaacctatctatacatattccttgaaacagggaattgatgatgggttcttagcaccatatcgagttattcgggtcaactttgatgttgatattaatggcttccggcctactaaaggtgaaaaagacgccaatggccaagtaatagaggatcgtcagtatacatcaaaggactttgatcgtacaatgataattgctgatcggactaagaaagtggctaaatatattagcgattatttgaagaaaaatcatgaacgatttaataaaacaattattttctgcgaagatattgatcacgctgaacgaatgcgaacagctttagtaaatgaaaatgctgacttagtacagcagaatcctaagtatgtcatgaagataactggtgatgataaggttggtaagggtcaattaagtaattttgaagatgttactagtaaataccctgtcctagttactacatctaagttattaactactggggttaatgtaaaaacttgtaagttaatcgttttagaccaaaatattaattcaatgactgaatttaaacagattattggtcgtggtactcggttagatgaagcacatggtaaaacattttttacgattatggactttaagggtgcttcacgtctgtttgctgacccaaagtttgatggtgaacctgaagataccgttatagatgatgatggtcaaggcggagtggactttaacaatgacgataagaagacagataaaaaagaggagtctgatatcggtgataaagttagtgaaggtaggacaaaatacttagtaaataacaaacaggttcaaatcgtcaactctcaggcagaatatttggacgccgatggtaaattaattactacatcattgcgtgactacactaaaaagaacgtgcttggacagtatgctactttggataaatttattgaagagtggcgtaaatctgataacaagcaagagcttttaaatgatatggaaaatcatggtattttctacaaagaaattattagtgatgagaatctaaaagatttagatccgttcgatttactagttcacttggcttataaccaaaagccattaagtaagtcagagcgtgttgctaatgtaaaaaagtctggattattagacaagtatcagggtgaagcaagaaccattcttgaagcgttacttgataagtacaaaaacgatggaattgaagaacttgaaagtcgcaagacgttaagcttaccagagtttgaacagtatggtgggccagttaagattattctgaaagtatttggtggtaaaaaaaactatcaaaatgcagtttcagaaatgaaagagaaaatttacagttaggattaggtggcaatggcgaatacacaatttgtaaaacgaattcaggatattatgcggaacgatccggggatcaatggtgatgcccagcggattgaacagctatcatggatcttgtttctaaaggtctatgatgatcgagaaatgatatgggaattagacgatgatgaatatacatcaattattcctgatgggctacattggcgcgagtgggcacaagataataaggatggacaaagccttacgggtgatgagttactagactttgttaataatcggttattaccttccttaaagaaaattacagttacttctgatactccaattagtaagtcgattgtaaaagatgcttttattgatgctaataattatatgaaaaatgggattcttttacgccaagttatcaacgtggttaatgatgttgactttactgatcctaaggatcgtcatttatttaatgatatttatgaaggtattctaaaagaactccaaagtgctggtaattctggggaattctacacgccacgagctttaactgattttattgctaagacattgcagcctaagttaggtgaacgagttgccgatttggcatgtggtactggcgggttcctagttagcaccttaaatatcctgaataagcaagtaaagacggttgaagatcgtgagaattataaccgcgcagttttcggtatagaaaaaaagggacaaccatatatattagcggttactaaccttttgcttcatgacgttgataatcctgacattatccatggaaattcattagaaaaacgggtcgcagattatactgacaaagataaatttgatgttatcatgatgaatccgccatttggtgggtctgaacttcctgttattaagcagaattttccaactgatttacaaagtagtgaaacggctgatctatttttagccttaatcatgtatcgcttgaaggataatggtcgagttggtgtaatcttgcctgacggattcttattcggtaatgacgatgccaagattaaccttaagaaacggatgttaaatgactttaatttgcataccattattcgcttacctggtagtatctttagtccttatacatcaattgatactaatattctcttctttgacaagactggtccaactaagcaaacctggttctatcgtcttgatatgccagaaggatacaaacatttctcaaaaactcgaccgatgaaattagagcatttcaagccagttgaagaatggtggaataatcgtcatgaaattcaagatgatgccggtaattacaagtccaaggcttatactccacaagaattagctgacaataactataattttgatctgtgtggattcccaacagaaactgaagaagtcttaccaccagaagagttaatgggtaagtataaagaagagcgggcagaactaaatactaagattgatcagacactcagtaagattaaagcattgttagaggaggatgattaaatgactcctgaacaattgcgggcttctattctccaacaggcaatggaaggcaaattggttaaacaagaccccaatgacgaacctgctagtgaattactagaaaaaattaaagcagaaaaagaacaactggttaaagcaaaaaaaattaagaagactaaagccttacctaaaattacggaagacgagaaaccgtttgatattcctgaaaattgggaatgggttagattaggtactgtttttaatttacaagcaggaaagaatagaaaagcttctacaattaatgaaattaaaactgtagattatgattatccttgttttggtggaaatggcataagaggttatgtatcagactttaatagagaaggaaaatatgcattaataggtagacaaggagctttatgtggaaacataaattttgctaagggaaaattttatgctacagaacatgctgtcgttgtagaaatatttgctggtacaaattataaatggagtggatattttttaaaggctctcaatttgaatcaatattcaacagcaacagctcaaccaggcctatctgttactaaaattaaccgtgtattaattccattaccgccattaaaagagcaattgagaatagtagcaaagattgaaaagttaatgccattaattgatgagtacgcaaaagcatataatcgactaaaagcaattgatgatgattttaacgataagatgaagcaatccatcttacaatatgcgatggagggcaagctagttaagcaagatcccgatgatgaaccggctagtgaattgctgaagaaaataaaggatgagaaaaaacaattagttaaagaaaagaagattaagcggagcaaatcattgcctagaatttctgaagatgaaaaattattcgacattcctgaaaattgggaatgggtaagattaactgaagttggatcctggggagcaggtgcaacaccatctcgatcgcatcccgaatattataatggtggaattccttggctaaaaacaggtgatttaaatgatggggttattagctctacttctgagacaatatctcaagcaggtgcagacaattcttctgtaagatttaaccaaccagggaatattcttatagcaatgtatggcgctactattggaaaattaggaatagcaggaatttcgttaactactaatcaagcatgctgtggatgtaagacttttgatggaatatataattggtatctcttttattatttattagcaatgcgacctcttctaattgatcaaggatcagggggagctcagccaaatatttctaaaactaaaattgaaaagtttccttttgcactaccaccatttgaggagcaaaagcgtattgtaactaaaattgaaaaactaatgcctttattggttgagtaataaatctataaggaaaaattaacaggtactgcataaagtctgacgtgtacccttaaagttggaacctgtatgttcttgctttaaaattgaataaatatttttctaggcaactagattctgctcatattgaagtggagtttggttgcctagttttgtctgaatacggcgttcgttgtaaaagtgaatccattcattaattgcttggcttaattcttcttgattgcgataactggtatcaggaccgatttctgctttcagtttactaaagactgtttcacaggcagcgttatccagacaggttgctcgatgcgacatgctttgcctaatgtttccctgacgaagtagtttgcgccaagcacgatgttgatagtgccagccttgatcagtatgtaaagttaattggtatcctgtatgaggtaactgcttaagtaattgctggagtggatctaatgcgaattgaagatttggatgttgactgattgaccaagtgagaagctggttagttgccaagtccttaataatttctaagtacacttttcgcccatcatgagcctttaattctgtaatgtcacaaaccattttctgatatttacggttactcataaaacgccgatttagcttattcttagctttcttgccatttggtcccttagaggaatcatacttacggactcgccgattatatttgatacatttaagtcccatttcatgcattaagcgctgaatgcgcttatgattaggtgtctttttaccaattaagcgatagtagtctcgaatttgagtgcttaaacggcgtacgccgtattcagcttggtagtagttaaagagacctttaataacggctttaagttcttcttcatcctcatccggatgttcaaaccgattttgccaatactgataggttgacatggaaatgggaagtgcatcgatcaaatcctttaataagtatttagccttgaggtcataaattacttgtgcgagttcttttttggatgctttctcaaggctgtcaatttttttgaggcatcgagttgtatctttaacaataagttttctctttgtaaagcttggttctgtttttggagctgaagaagcttgtcttgattcttgtcgtgtcgtttgaccatttttaggtttccttccccgacgcaatctcagtaaagcctgtggcccttgcttgttatagagacattcccactgatacactgaacctggggaacgatatccaaagtgaatacaagtttctgaaattgacgtcaaattttcttgtttccactttacctaaccgaaaatccccagttactttgggtggattgagtaatggtcctttaccaaatcttgcataaattcccacccaaattttgaaatcatgttcagcaatcccgtatttatgcctaactgatgctaaagtaacattaccgttggcatattcttcaacagctttaagtttagttttaacgctaattttggtcatataaaatacccccagagttgatttccaactctgggggtacacgtcagaggattatcctcaaggcctgtttttatattgagagaattctaagacagtagtatattgatattaaaatttaatgagaaagaagatgggagagtagtggctaaggagagaaaagaaacgatctttacgaaggatattgttttagtaatggcggcttcattcttcttcatttttagtaatatgtattgtaatccgctgattaatggctatgctcaggaattaggagcctccagtgctttcgccggaattattgtggggatgatgagtattgttgcgatgtttcttcgtccagttgcgggaaacatgacggatcatttttcaaagtatacgctggcgtttctcggtggtgttttaagctttattggggttatgggttacgttattacccccaatagcggcctgctcctgttctttcgactaattaacgggttagggtatgttctttgtacagtttgcatgacaacctggttatcatatttagtcccgtttaatcatgtcggtgaggcaatgagtttttatggattaatgaatgctttggcgatggcttttgcaccagcggtatcgatcaacctttaccgcgtgatcggttaccgatatgcaatcattatttctgcattagcatcattaatgatgattattactgtgcagtttattgataataaagctaaaccagatcctcaaccgaaaaaagaaaagactaagggcttccatctgaaaattattcagaaggattcgttgccaattgccttcttgactgcattgtttgctattccatactttgcaactcaggcagatattgttacctatacggaacaacgtcatttgccaattgcagttggctcttacttcttaatttatgcggttgttttgttaggaattcggcttttcttgcggaaccaatttgatacggttaagttcggaccatggctgattattagtacaatcgcaacggtcttttatttaattatgttggcagtaatgcatactaactttgaaatggctcttgccgcagcagggatggcctttggatacggattgatttattcagtttgtcagtcaactgcgatgatgttggcaccttctaatgaacggggcctggcaagttcaacattcttcttagggttggatgttgggatgaccctcggacctgttcttggtggggtcattgattcaacaatgccagtaaaatggttctatccagtaatgctagtaattattccatttattttgctaatttatgtattcaatcggcgcaagttaaatagtgcagtacaaaatcattaaataatgtcaaaactgggaaccaactcgagccttgttcttaataagggttcaggttgattcccagcttttttattatcagaattttagtttgttctacatgaaacacatttgatattctagtcaggtttaacgatttcttgtttccagtggtggaggtgttgttttgtgatcacacaaaggccatcttcacctaatgccttcattttatcggtacacataatcttaatatcaggattatcggcaacctgttgttcaccccagtaatttaagtaacggagggcagcataaagtttttccccttcagcggttaaacgatattcaacgtgtggaggaatggtattgaaactcttccggtcaacaattcctgcatcgacaagttctcgtagctgatcgctaagaactttgtgggaagttcctaattgcttcactaattctccggttcggcggggatgaccggcaagaaggtaaagaatgaccggcttccatttaccaccaatgattgatagggcatagtctgcaccggtattaaacattttagccataaaaatcctcccttcagtactttcattatatatgaaaagagtgaagagaggagtagagttattatttaattaacttaaagacttgatcttctggaaggtaatctttatcaccagctggagattcgattgagccaaatggcatttctgcgcgtaacttccatgattcaggaagatcgaatgcttcatgaatagcatcatcaattagcggattgtagtgttgcagactagcgccaaggttgttttctgccaaggcagtccagacagcttgttgagcaccaccaattgcttgctcagaccaatccgcgaagttagcggcatagctagggaattgttcttctaagttatgaacaatatcagtatcggttaagtaaaggattgtcccgaaacctgcacggaatgttgcgatctttgctttagttttggcaaaagcagcaggatcctttacaatcttctggagagtttcttcaacaatatcccaaactttgtcagagttcttgccaaaaagaacaactgcacggacagtttggctgttaaaggcacttggagagttacggactgtttcctttaccaggttaaaaatttcttctgggcttgttgttatgttatcgccaagagcataaatggaacgacgcttggcactgagttcattaaattttgattgcattgtgagttcctccttaatcaattctttgttatttcacttactaatagtaactaaaatatgagacatggacaagatgagaaataaaattcacctagttacaaattcttccctataataagatttgataatggcagattgcaagaaataacttgaacgaatttaatgacgtagattaagcaggaagatctcgattggtgtatgccaattaagacatttaagtggccgtgaattcagataccaattgatttgaaccagttggtaatcacttagttcttcaatggcttgtcccttgggaataaaccgtcgcaaaactcggttacggttctcattactaccgcgttcgtgcggtgaataggcatgggcaaagtaaacctgagtacccgttagctgttcaattgcctgataattagcgaactctttaccatgatctacggtcagcatcttgagtttgtcttgaagttgactagctagttcaagtacggcttgagtcatggactgactgtcgcgaccatggagccgtttaacaattgtcaggcgactcttacgctccacaaaagtagccacagcttgacctttacgcttgccagaaagcacggtgtcagcttcaaagtggccaaattcctggcgagtttcgactttatgaggacgctcctcaatggagcggccgtgactgaacgtaccacgcttttctttagcacgatgacgacgaattccatgatcaggcaaatcgggtaactgtacatcaagccagccttgatcaatccagttatagaccgtcttgtaggcaatcccaactacatgggcaacttgttcaggggaccacttctggacttgaatcttttcctcaatcaagtgcttaaggcttttagtgagcgaagacttccgcccccgttgactaaccttttgttcaaagtcagtttgcgctagctcagcctggtactcactatttagccggtgaagttcgttaatgatggtggtcttactaaagcctaagtagttagcgatgtatcgcaaggaacgtccttcattatgaagcgtttcaatgacaacacggtgctggaatgataaaatagtggtgcccatcaaggtccttctttctaatggaatgttgaggtaacaccattaaagaccttgatgggtttttctgtccacttaaatgttcaacttaaattttacaatctgccatatgcaaaagctactaacacgaaaagggaaataattaaatatggcttaattaaaattgaattaaataaaaatgttgactttctaattttagggtgttaatcttttgataatcaatttaacaaaaagatgttgatcaagaaagattagtaatacttacttaagagagccaatgtttggtgtaaattggtggacagtattataaaaatctatcacttgtgagtcgtatatcgaaacttaagtagaatatactggtaggcgcccattattgtgtcagctaattgttgctttgcaactgttggtgaaggtagttatttcactacgaaaaaaggtggtaccacgtgaaaacgtccttttcaatctcagctttggggttggtaaggctttttttatttaaaatttaaaggtggtggtgtaaatgtcagatagcgacattattaatattaaagaaagtatactaagaaactctattaatcatagaaaggtgtttccttttttgattaatatttaattcattgtttaatttatgacgttatataacgtcttatttaataaaaattggaggacttacctatgaaaaagcttaaagcacaccgtctattttatgtattaactcttctaggaacacttttgcttcttttaaccggatgtggaaagtcaaataaatcatcacttcaacaaattaaagagcggggtactcttagagtgggaatgatctctgctaatccaccatacgaatcacagattcaaaaaaatggcaaaacgcaaatgcagggcgctgatgttctactagtaaagaaaattgccaaaaacttaggtgttaaatatgaattaaagacaatggatttagatggacttttgcctgctttacaagctaagaaagttgatatgttagttacatcaatggctccaacgccagaaagacaaaaagcggctaagtttactgacacgtattacaagagtaccaatgtcttggttgttccaaaagctaatctagctcaatacaaaaatgccaataatttcaagcatgctaccattgctgtagttaacaattcatctcaacaaccaatgattcataaggtattccctaaagctaccactaaggatctatcaaaggttaccgatttagctttagcagtaaataatggaaaagctgatgccttctgtattgacaaaccgactgcaattatccttctgaagaagaatccagaattaactatgacttcatggcgacacaacgatggatcaaaaggtggtgctattgctcttcctaaggggacttcggatgaccttgtaaatcgcttgaatgaagtaattcaccaaaacaaggcacaatatagcaagtgggttgatcaatatgcacagaaaggaaccaactaacaaagattagaaggagtgattttatgttttcaaattactcatttattacagaatattggccattatttatacatggtcttgtaacgacaattgaacttgcagttatctcaattgtcttgggtctactattaggtattaccttggctgtgatgaaaatgtcaaaggcaaacttactaagcttaatagcaaaaacgtacattggcttcattcgtaatactcctttattggttcaaatatatatcgtttatattggccttccacaattactgggattctccgtaaatgactttgtaacaggtatagtggcgctaaccttgtattcaggtgcttatattgcggaaattattcgatctggtatccaatctttaccggtagggcaaacagaggcagcagaaagccttggtattccatcatatcgtattttattggatatcatcttaccacaagcattcaaaaatattcttccagcactgggaaatcaacttatcggtaatgttaaagattcatcattggtatcagtattaggtatcaccgatgttatgtttgccgcccaaacagttcgtggttcaacagccttaggattggaacccatgattattgcttctgctctttacctggtaatttgtctgattctgaatcagattcttgctttgtttgaaaggaggatgcgtcacgatgcttgaattacgtcacgtcacaaaaaagtttggaaataacactgtcttacatgacattaatcttaaagtccataatggagaggttgtagtgatcattggtccttctggatcagggaaaagtacgttgattagacatatgaatctcttggaacagccaactagcggtaaagtacttttccaggataaaattatttcagggagtatttctaaaaaagcccaacaaagggtccacgaaaatattggaatggtctttcaacattttgacttatttcctcattttactgttagacaaaatatttcgtatgctccaagagtggtaaagcatttatcaaaatctcagactgatcgacaatcgacggaattactaaaggaaatggatttagaaaataaggctgatgcctatcctgatcaacttagtggtggacaacagcaaagaattgcaattattcgatctttagcaatgaaccctaaggtaatgctttttgatgaaccgacatctgctttagatcctgaaatggtagaagaagttctgaaatcgatgaaaaagctagctaagagtggcatgaccatggttgttgttacacacgaaatgggatttgcacaggaagttggcagtcgcgtagtttttgtagatagaggtcacattttggaacaaggcacaccagatgagatttttcatcatgcaaagcacgaacgaacaaagaactttatttctaaaattctatatacctagaatagagagtgtatctaattatgttagaaaaaaatattaagacaccattatatgagcaaattgagattgaattaaagcgcttaatcaatgatgataaatataaacaaggtgctttaattgcttctgaatcagaacttggcagagagtttggagctagtcgaatcactattagacgggctattagtgatttggttgatcagggttatctggttaaaaagcagggaaaaggaacttttgtccaagcaaatatggttgaacgtaatttattacatctaggaagctattcaaattttatgaaaaacagtagtaagcatccttctgtacaaatagttaagctacaagaaatagcaagtacagataaaatagcagaattactaaatattttccctggagaaccagttataaatttgaagcgactagttaagtttaataaggaagtaagtggcttagaaagtgcttactattcttcaaataaattcccaaaattaagagaaaaaatcaccccagatatttcaatggctaacctattatctactcaatatggatataaggaacagggtagtaatcagctattgagctatgtaccagctactagtgagttagctcaatatatgaataaggttccgggagaacctctattcaaattacgtcgtcaagtaatggataaggaagttatttatgtgacttttaactattacgacgcatctactaccaactttgccattacatctggaaatcaaagaaaggaatgattctatgagggtcttggccattggcgataatgtaatggacatttatctcgatagtaagagaatgtttcctggtggcaatgcggttaacttcagtgttatggctactcgaataccagaaattactagtgggtatcttggcaattttggcagtgataatttggctggattaatgaaaagtacattaaaaacatttaatgtcaacattgatcattgtagaaatttgaaaggtgaatccggatattcgctggttaaagttgttaatggcgatagaagatttctagctagcaatagaggcggcgttctgaatcaaggaattaagatttcagatgacaaggactatattaatgcaatggatttaattcatttaagtgttaatggtaatggaaaagaaataattaattacattagtaaacctaaaattgtctatgactattccgatttctctaatgagaatgaaataactttgactattgataatgtagatcttgcttgtttctcagtggggaatgtaagtaaagatagagtagttgaacgagcaaggcagcttcaaagaatgggaaattatcatactattctactatttactatgggaaaacaaggggcaatggtttttgcaagaaaccgttgctattaccagccggctcaactgactaatcatatcaaagacaccatgggtgctggagattcttttattacttactttagtacaggcttgctaagagaaaattgggatataagctctattcctaatattttgaaatcagctagtttatttagtgctaagcaattaaaaatagatggatcactaggagtaagttttaatatccctggtttgcaactaaaagaattatgtaaggagaggtaattatggaaaaagaaacaactcgtcaagaagtacaagaattagtaaaaaaaattgttgatactaaagatgttaagtctttagtgtttatgggatgtggagcatcttattcagaattatttggcgcatattattatgcattacaaaactcaaaggaacttggtagttatttgcttgaagcaaacgaatttaattatgatgttcctaattattttggagaaaatacagtagctgtcatagcgtccctaagtggtacaactaaagaaactttaaaagcagtacataatgctaaggaaaaaggcgcaacagttctagcattgacctttgctcctgattcaccactaactaaagagtccgactatgttttacagcataagttttttgaaagttatgccacaaagtcttctaaacagaaggtagctctaacctttgcggttgaattattgcatgcattaggtgaaagtaataattataatgaaatggtacaaggattatcagtagttgatgaggttgccaatgatgcagctgctagtgtggataatgatgcacaaaaatttgcagaaagatataaggacgaagacaaggtatttacattatcatcaggttctaatagaggagtagggtattcaactgctaactttatctttatggaaatgcaatggattacaggagttaatcttgatagtgcagaactatttcatgggccttttgaattagcagtggaagaagcaccattcctactatttatgtcagatggaagaacacgtcatctagactctcgagcactagaattcttgcaacgttttggcactaagtatacggttattgatgctaaagactattggctcgatagtaaaatggatgcttcagttgttgattactttgatccactggtgcttacctcagtaatgagaaagtttgcagagtatctgggaaaagctcgaaaacatccattatcaaagcgtcgctatatgtggaaactagaaaattattaaagtaaaagaagtaccacataatagttagaaaataatctaactattatgtggtactttgctaagttacaaaagaggagatgaattaatctacttagtcaaaaagagaaatgggaaaattgaataaatattttttctaagtggcagattgcaagaaataacttgaacgaatttaatgacgtaaattaagcaggaagatctcgattggtgtatgccaattaagacatttaagtggccgtgaattcagataccaattgatttgaaccagttggtaatcacttagttcttcaatggcttgtcccttgggaataaaccgtcacaaaactcggttacggttctcattactaccgcgttcgtgcggtgaataggcatgggcaacttgttcaggggaccacttctggacttgaatcttttcctcaatcaagtgcttaaggcttttagtgagcgaagacttccgcccccgttgactaaccttttgttcaaagtcagtttgcgctagctcagcctggtactcactatttagccggtgaagttcgttaatgatggtggtcttactaaagcctaagtagttagcgatgtatcgcaaggaacgtccttcactatgaagcgtttcaatgacaacacggttctggaatgataaaatagtggtgcccatcaaggtccttctttctaatggaatgttgaggtaacaccattaaagaccttgatggttttttctgtccacttaaatgttcaacttaaattttacaatctgctattatttgaaaagttaagcaaatcgattctgtaaaagcaatgataatggacttaaaatgcatttttgaaagcttttaaaataattgttgacaaatccactagctagcgataaattaaaatacaattaaataatgattataaaaacacgttgaaaagaagagtagctattagcagatggcaagagagtccccgtttggtgtgagaggatgatttacttatagtgaaaatcactttgagtgccaggatgaaagatagtaatttctggtgggagtagcccattatagctaccgtgtttaatacaaagagtattgaacatttgaggctagtagtgtgaactactggcgaataaaggtggtaacacgcagaagcgtccttagattaagcaattaatctgagggcgcttttttataatcattaaatttagaaaacaaggagttgcgttattatgaaatttacaatcgttggtgctggagcaatgggactccgctttggtgtattattacaagaagctggaaatgaagttgattttgttgaaggctggcaaccacattacgataagatgaaagaacagggtggtgtttacgttactcgggaacaccagaacaaacatttagttcctgtaaatgtatatacccccgaagaatacacagcgacagacgcagactttgtattctttgaattgaaacaaatgcaacttgatgatatgttgcaacgttgtaagcatttctttaaggatcaatatgtcttaacagcaatgaatgggatggggcatgttgaaaagttgttgaaatacttccctaaagaaaaattagttgcggggaccgcattagttgccactattttaactggtcctggtgaagttgaattcgttggtaagccagggatgggaactaccaactgggctaactatactgaaaagcctgatgcaaagactgaagagctgatggctgaattgaagaaagccaacttcaatccttcattaaaagataatttcatgggtactttgatggctaaagtagtctttaactcagttgttaataccttatgtacaatgtttgaaatcacaatgggtgaatatgctaactttgataaggcagatgaactttctcgccaattaattgatgaagcatacgatgtctgtgaacgggctggtgttcaattggttaatacccgagcagaagaattggaaagtgttaactacgtatcaaaagttggcaaccctcaccactacccatcaatgtaccaagacatgagtcataatcgtcctgtcgaagttgactacatcaatggttactttgctaaattaggtcgtaaatataactacgaagctaaaacacatgcttttgttactaaccttgttcacttggctgaagcaacaagagaaaagaactaagactaaaccgttaataatggtagccaagctactgatagcaacgctactaacaagccaaccattgttttgcctactaacggtaaggaaagtggagcagctactcaaggacaatacatcaacgttgttcctaaggatagcgttgcagcacaagcaggcattcaagcacctgcagctccagaaactaccagtgtaacatttggtactaaggaaggtaccatgatgactcgtgaagaatacaaggcacaacaagctaacttgccacaaactggtaacgaaaacagtaaagcggttgttgctttgggcgtcttggctggtatgtttggattaggcttagcaagtaagggtaaaaaagaattttaattagtatatatttgttctgacataatatatccgttattaaagcaatgggacttctgcttgatgttctttcacaggaatcccattgtttttttatttagaaaaaggattacgtttatgttgcaacgtaatccttttgaattattacttattctttttcttgtccttattttccttttcttgctcttcaatgcgtcgcaggaaagtgcgataatcttcatattcgcccgcactaagatgtttcacttgctcgtcaataaggtctctcatataaccacggataaacttgtgccctgataccattactaatgccttaatctcgttctgaacgtcgatgtcgacgccaatgttaccgtgttttttggttattgttttatacattgttattacctctccttattttttaaaattatccttaatctcaattgcgttaagaatattcataaaattgtttttatcagtaggatttaaatgtgctacttctttatcaacaattttgcttaacagctgtttttgagttaccttttggatactagataacgcaattaatttgtttcgtgtgacgttgctaacactaactgaagttgtgtaattttgattcttcttagtcatatttgttttcctcctttactatgttctaataaaaaaattttttgaaataatttttttattctatgaagcttagctaaagtaggagatactaaaaaagctattagcagagactaaacgaaaataagctatgaacgttatttgatatgttcatagcttattttttatgattttattttattgttactatttattttcttgagccttacggttactttccattacatgccaacaataattaattgccttagtatattcaacccctgtacgattgtagatattagtaggtaaatcatatccataataggtgcataggttatctatagtgtcagaagcatccccagcaactctaaagggatcggctaaatcatcgattcttttctttgataagtcaatgccttgtttttctaagaaaaaagtggatgaattgaaggtaattagtttactggccttattaaatattgactgtatctcgttcttgtaattgctaaatggttgctcattataggtttcctcaggcttgatgccatttaagtcagaataccaccaatctacaagcttggtattaaatgtatgattgaataatacattatcgttagtgtccatgatagtaagcctgactatttcatctagagctgcaggtccagtaagatctacccaatatactagttctctattcttcattgcaaatcacctcgactggcatcataactctgtggcgtattaataggctgctttctgttattgatttgccttttaatcctgtaaagagtagattttgaaaggtgaaattttaattgagttgcagcatatgtgtgtgattgcaggtattcgtaagcttgacgataaatgggcgtgataacgcgtttatggcgtcctcctgtattcagcattgattgatacttagccttcttaattgccttagaagcacgtttctggcgcaaataatgtagatagtcaaggtgggctaactgtgatgcaatgatccaatcactgctatcactatcactgcttaaatccatatcgctagattggatgataatacctgtattttccactatgtacatcaaacaacatagttctctaatgttgctatatagacaagttagggtagggactactagtacatctccttcttgtgcgactgttgttagaaatttaaatagctggtatcgctctttattgttttgcctaaagacatcagcaaaacagtgatcgtatggtatacccatacttaataagatttttgcttgatattcaaagccgtcttgtttgatgacgctatcttttagccagcctgaaacatagccatattttgtcatatcatttcactccttatctatttgataagagtaatctaactaaaaaaggctattcaatttcattttgagattgaatagccttttttagttataaataccaataatatggactgatgatgtagtatgttttcatttccttgtttgtgctaaggcagtcttaatatgagaaagtgtcattgaggtgtcaaataatgagtgaaagtaccatacttttaattgaaaaaaattggagaaaagcaagggtgttagtaggtggtatgaggttgtgacagaaatgggtcagatttgggttggatattgacccctatttatggcaccaaggtaatccttactgggagtaagaataaagtggtttattaattgtatttctaaaagaaggtgtcaagtagggaaattgccgtaaaaggttgatttagagggatctataaaggtattgtgtcagaagtgccaattttattctatttttttaagttctaactaagtatcttaataaaataacaattaatttattcattttgatttaaacgatagatattatttaaagatcctaaatgaaaattggcacagatgacacacaaagcacataatccctacttactattgactttacaaccacaaccataaactaacaccaggggtcagcttttacatcaactattttcaatttgtttctttattctttgcaatgttgaaactgaaatgttaaaagccctggccgtatccttataagtatggtttgaaaggtagtcatatgccgcttgatagtgaggtgtaatcaacctttttggacgaccttcatggtagtctctcttatggagtctagcataacgttttccttcttgagttctatccactatcatgtcacgttccatttctgcaacagctaaaagaatagtcttaaccagcttaccaattgtagagttttcaagtatgcctatgttgagtacattaaatttaatgcctttgctcattagtggatcaagtacatttaacgcctctctagtatttctagctaatctatcaagcttggttactgtaatagtatcaccatttcttactttattagttagttcgtcaaacttaggcctgtttgttgttgttccagtaaatttctcagaataaatattacttttgtctatacctatttccattaattgacttacttgatcgttaaggctttgccctttagtcgatactctggcatatccatattcagtcatttctattaatcccttttctgaataaactttatgaccacaggataactccgttgtttagggattggaagtcttgttcaaatactcaaaagttgatgaacaattaacgtcacgtacctactttataaaaaaacgaaaaaaatcaaaaaaaatatatacggtaaaatgtataaaaatccattctatattaataaaaaaacgtgttcaaacaccgttagatgaacacgtttttgaatttatttaaatttcagcaaaagtgcatacttattgcatatataagtaattatataacatattatattcgttgtcaatagtaaaagcaaaaattaatttgatttcaataaaattatgtgttttaataaaaaatgaagcgaaggaaacaaaccatcaaaaaaacgtttccttcacttctgtcaaaatgtaataagtaatcatgacgaaaacttatcttaatttgcaataagaatgtaacgcttcatttaaataccctttatataaaaaacgttctacattcatactattagtatactctaattttcgagaaatagcaaataattaaagataggtcccgtcattgaattacttattaatcaatggagggacatttttatgttatttaataatcatggatatgtaggtcaatcgcgaagtgtaaggtctcaagaagctattgaagagcatgaagtacctttaaatcaaatcacccgtgacttgattaatgaagttattgaagaacttgttgacgaggagacaattgataaggaacaagaaaattggctaaaagccattcccgtatatgtttggaaaaaccaaagcccaaccagctggcatcatacaggtaaatattatcacgaaacctatcattatgatcttccactctatgctgaagaatttatcgatgatcctgaaattgttgatgaaagcgtcaaagagcataaacgagaactatctgaacgtaggcaagcattgcttaacgaatctactgaacctgaatatgaagtatattattattctaaggatatttggggaggaacacgccggcatcctaagattgttgatatcgaacatggatacggtgttgcaaagaaagagagcagtcgtttatatcccgtttcggtaagtgatgaagattggccaaataactcctattattcgataggtggaaattatattactgttaagcaatatagtggatatttagaattagtcgctaagcatcctgaattcaaaggaactaaaaggaaactaaataaagttctcaaagcattaggagtaaccctttaactttaaaacaagaattgtcgaaagttggaggtaataactaatgcctaggcgaaagcatcatcataaaaaagataaagtatttttctttaaaagtacccctcaatttttgaaaatggcagaacttgctcacttgaacaaggaatttaatcacaaaactaatagtaaagagtcaattaagctactgccaccccagatttctgatacagttattaccaatgggggatcccataagagtcagcaggatcgcttaaattttactaataatgggatttatgcatacagtaagtgcttagcccaagacgttgtacaaatagatgttcattcattgctcccaacatgggcctttaacttacggctattggatcataaacataaacaacttttcttgagaaaaaaagaaatcgaagcaacacctaattatatagataataaacgcctggtaaatgaacgaaaaagagataaagacaacctcaaccgcttttgctcagagaatggaaaaacaaagaatgaacagtatgttaatcgactgagatgtacgtatagcggaatgaacatgatatacgatatgcttcaattctggggtttagaaaacgtgattaattgtgttaatgatggatttattatcagaataaatacacgaaactttgataagaagtatcaacaatttcaacagcgttatcaaagaaaggttagtcaattaactttttcaatgaaaaagtggaactatgctttaataaaaaacgatcaagaatacttgttatttaattctttaacagattataaatgtcgaaatcattgttttgatgttggagctaattattatgaaattactggtgaaagtctaagagaagcaaagaaaaataaccatgttaattctttaattttagctaaagcagaaaaacaagaaaaggaggcagtgtatatagtggaaaagcaagtatttgaccaagatccttttaataaagcaacaaaagaaaacatggaacgacttgatgaagtaaaaaagataatgaatgaagctggaattcaggacatcaatcatggtatcttgcaacctcattattataggtttgaacttgataaaaatgatagtcagcagagtaaagaatacataaataaaattacaaagagtatgttgagcaaccaaatttttatgctcgaaaatcccctgctagtactgttaatttattcggtcaagtaataaaggcaactgaaattaatgatatggagcagtatctcagagatcataaagatgtaactgttaatgattttgtgcctccaattattagaccagcaatagtttcaattgatgactggattaagcagttattgaatgacaaagagattaaacataatctctacctatataatagtgtagcaattgtgttgcaagtatgggcaaatgaaaatagccgtgatcctaataccattatcaagaagttaaatgatgcgttagttaaagatagatttagcaatctaagtattgcagataaagtgtataacgatcctgcaactatccttgttgataatcaattaatggcattaaacgagcatcatgtgtacactgcagattctaaagcggtaaatagcattattgacaaatatattgatgcaagcggaaaaaggtttattcgaaactctcgtaataacgtgtacgaactccttaataataataagtataaaaatggcaaattagatatcggatttaaatctgagaatcagacaatctggattgacaataaaggcgtccacacagaaaatccactgcttaagaaggttggcaattacgtaaatgttgattatatcaattatgaagcagataaggatttatttaactcagaagaatatagtcaagttgaagcattcctaactcatataagtgatggctactataggcaaattacatgtatgcttgctctaattgttttacaagaccctaatattgttccaacacttcgcagggctttcatattgtatggagtgcctgggtccgggaaaactgttttagctaaactattatgcaagatttttgatgaaccaaataagccgtcaagaatactatgctctgaaccaaatattaataaagtgtttacggatcctaatcttattgatgctaatgataccaaaaaagggaaattagtattgtggtttgatgattttcagtctgatggtaggtcgaatgaaattaaaaggaatgttggaacggtaataaatgcagtgactagcaatgaggcgaaaacgggagctgcaaaattccaacaatatcacgatattaaactgccttcattgattgtactttcaacaaatgatgtcccacaaataaaacatattgggactgttgataggatttttgtcataaaatcatcaaaaaggttaacagacgaccctaatattagttttagttccaatatagatgcgtggataaataataagaaagttcaagaagcgttcttctgcataatattaaataccgctgttgatatcttaaatatgagcaaagatgaagcaaagtctatttttgacaaaagtaattccgctcaatcagcactatcaaaccttaattcgtctattgaagctttttttgaggaacaaaatattacaagtctttatgatcttgttggaatgcaagcaaagaaactttttgacgtttatttagaaggagaaaaaaattttgcttatgcaaccacttatcgtgctttctgcgatcaaattgagggattaggtttgaatttaagacgaaagcattttaatcataaaaactatcaaaaagttatctgctcgaaaaatgataatttaacgcaagaaaagttgaatttaatgttaaaagaaaatgaactatctcccgatcaagttgaatattgggataatgagattcatcgtcaacgaggaaaggttagttcgtggcattgtggttatgatgaattaaaagagaagtataaaaatgatcagaaattatttatgccatttgaattttgaattaacgattgaaggggatttacgtgaataataaaaagaactttaattggcaacaggctattaatatgaacaaggatatttttttggaatattttgctcaagcaagtggattaagtaaggctaaacgtcaaccaattaacctaatggaagaagaacataggattggtgtttacttttcatccgcagcatatcttgaatggttgaataagattaatgatatgaaacatgaaattatgattttaaagactaaaaagtaggaggaacttattatggaagcaaaagacttaatcggcaacactctaatcaaaaagattacaaattctaagggcaacacttggaaaccagtattgcgtcagcgatgggttggtaaatttaaaggattaaaagaatatagtcgctcatcgctgaaagataattatctaattttagaagtaggcggttactttgatggccttatttttaacccggacccatttattgtagtggatggaaaacgaatttatctgagttacgaaaattctattccaggcttatgtcgaatcgtactagtggatattcgagctttggaactctcaaaaaagtatgattttaatgacaaatatcaaggattcgactctgaacgtgataaatatcatattgctaaattcaagtcctttgacgaaatgaaaaagattgcgaagaaacaatactcaattaataatgagttgccgacgtatgatattaagatggtctgggaacaggataaaactagtgagacatatggtacacggcattattccgtcacgacaaatgtaggactttctgaagaactagatgaagaacttttgaaagcataatattcattcagaattgcaatgtgcagagttataatccaatccataaggaggccattattcatgtttggcaaagaaattttaaacggaaagcagctgtgtgaaaaactaggcgtaagtaccacaatcttgtatgaattattagataatggactaccatttcatcaattaacaacggcaagtcgaaaatactataacctatcagaagtcgaaaattggctgctaaatgcaggatatcgtcagaaaacgatttggacaaagtaactatagataataatgatgggggtcatgctttgtgctgaccccattttttgaaggtgaaaaaatgattaagaaaatgacaactggtaagcacaaaggagagtaccaagtgcgcatccagccgattaataagattactggtaaaagggaaagctggccagtagattacgcttctaatcgtaaaactgctaagtcattagaaagacagatgtgggcagattatgaggaagggttgcaattagctgacggcagtgcgatctttgcagatgaatttcaaaaatatattgatgaacgaaagaatacgatatcacctgttacttaccgtgactggcaaaattcagcaacggaatttaagaaatattttaaaaagactaagataaaaaatattactgaacgattggttgagcagttcgctcacgactttattaaacaacataaggctactgtaggacgtgctactgtaattgatcatcgcctgacccatatgcgaagtttttttaaggaattggaaggtaaggtagtaaagaaaaatccagtacccgagcaatatttggacaagttttttcgcaaaaacgaattcagtgttggtaagcaacgatacttattcacaagcactgaacttaaggctattaaggctcaaatacaaacggagttaaacaatactacaattgctaattggggcacccgtttagcgatttggattgatttggaaaccgggatgcgtccaggtgaaattcaagccttaaaatttaaaaatattaccacggaagatggatattctacctttaaaattaatgatagttggtcagactatgcgcgtaaattcaatgggacacttaaagcacgcccaaagggatactcacgatattgtttacctatctctcaagaattagtggatttccttgtcacataccagcaaagacaaaaagaatttctaaagtatcatgatttaacgaatcctgaggggttgctctttctcaacctacacgattataggaagtgtgtaaataatattcccatcactcagaagagcatgaacgaaatgttaaagaaaatttgtaataaattaggtattcatagtgatggatcacaattatctatgtattcttttcgacatacattatgtacaaagttagcgaataaaccaggaatttcatatccatgggcatctgagcgaatgggtaatagtctttcaatttttatgcgtgtgtacgttaaaacagatcgtgacatcgatcgaaagatgatggataattggatgaaataaaaagcaattagtaattgaacgtgaaaaaaatatctattttttcggtgcaacaaatgaattatcggtgcaaaaacagtcaattttgcaccgataatttttaaattgcactgataaattggagagattgggttaaaataataaagaataattttgataagaaaggagatgaaggaattgaaagtttttaactaccagactttaaatgatttaagattaactactaagatggttgaaaaactcaatcaaatctatgagttaaaagggaaaacagcccatgtatccttaaaatcaaaagatattatggataaattattagcggtagcaaaaattgaaagtacagacgcatcaaaccgaattgaaggtattgccacaagtgatgcacgactaaaaaaacttgtaagccaaaaaactactcctgaaaatagaagcgaggaagaaatttcaggttatcgcgatgttttagcaaccattcatgagaattttcaatacattaaaattacacctaacaacattctagcgctccataaggaactgtttaattttactgaaagtacgtggggcggtgaatttaaaaatattgataattctattgtgactacatttgcggatggtcatcaggagacgagattcactccaccaccggcttacttaactcctgaactagtccaagacttatgcacggcttacaataatgcaattaccaataattcttttcctcctttaatattagcagctgcctttatgcttgattttgtttctattcacccatttagagatggaaatggacggatgtcacggctattaatgttgttagaattacatcaattgggttttgaagtcggaaaatatattagtttagagcgcttgattgaaaaaacaaaagctgaatattatcgaactttattagaaagttcaggaactgcttggagtaataatgataatcattatggcccctatgttgattactttttgagcatcgttcttcaagcatatcgtgaactaaatacacgtattgatttcactaatgatactgaaaaagatccagaatcattagtgcttactaagttacgtaatagtttaaaacctttatcaaggcgtgaactgatgaacttaattccacagtatggtgagagtactattaagcacgtattagcagaattacgaaagaagaacataataaaactggttggtagagggagagcaagtcgatatacagttaatgactaatcggtgcaatttaaaagttatcggtgcaaaattggctggctttgcaccgataaaatgattattgcactgaaaaatgcacacaactagacacataaagtcaaaaataattggcttaatcgttgatatctcaatggttggagcaatttaacctccaagcttctagtcagcactagaaacatactaaaagcctataacaatacgtttttaccgtatttgttataggctttttatgttagtttaaggctatgatttctcacttttttcacatgttttgaactaaatgatatcctataatttttatgatcacgaaaatggttgatatgatagtatttgtagtcatttaaacgtgtgaaaaaatgtgaaatgccagaagaaggtattgtaagcaattatacttcttcttcccaacaatgcgtccagaaaaggaaactaaagatagcaagaagggcaagaagaaaaataagaagtagcctaaaaacttgctatgacggcttttaagcgacttcgtggatttaggctaaatcagttattagcttctaaaaagttagtaactgtggtgtgtgtacaccaaaaatacaccaaatttaaataaattaagttggtaaaaagctggcataaaaaatgaagggctacgattctctatttgggaatcgtagtcttttgtttaaagctataattgaagccttaaagtaatcagtaatatttgatgagaggtcaaataacccttgttttagcttactttattggttgaacgataaaatctgttactccattaaaaaagacctgttagggcacgacaaggcgaattacaagggctgcgctaatagatgcgaaaatgaaagcataagataatggcattttggcaatcttaagcctaagccaactcagcaaaagtaacacgtttgtttgccacggtgaaagcattcaatgtaaaaactgggtgtttttttattgagcagttaacgtttataggatatgaacaatgtcaatagtattattaaattcctattattttgtataattagtatagtaattatacaaaggaaaggaacggatttgtaatatatggctcggcttgatcagaaatctatagaacaattaggaattaataaagtagaggatgcactctggaacgttagagactgggctgatttcttttttagtgaaaatgataagactccgctgttagatggcaatatattaatttatagtaggcagattgcaagaaataaattgaacgatttattgacgtagattaagtaaaaagatctcaataggtgaatgccagttgagccacttaagtggccgagaatttaaataccagttaatttgtgttagttcgctgttactcaactcttcaattggctttcccttgggtataaagcgtcgtaggacccgattacggttttcgttactaccacgttgatgtggtgagtaggcgtgggcaaaatataccggtgtaccggttaatttctcgattgtgtgaaagtccgcaaattcttttccatgatcaacggtcagcgttttgagcttgccattaagttgatgagctagctcgacaattgcctgcttcattgattgactatcacgaccattaaggcgtttaacgatggtcagacgactctttcgttctacgaaggtggcgactgcttggcctttgcgcttgccagagagaaccgtatcagcctcaaaatgaccaaactcctggcgggtatcaacactagcgggccgttcttctatggagcgcccgtggctaaaggtaccacgcttttctttggctcgatgtctacggataccatgatctggtaagtccttgagctggaggtcaagtaatccttggtcaatccaattgtagattgacttataggcaattccaaccacatgcgcgacctgttcagctgaccatttctggaccttaattttctcttcaatcagttgtttgagattagtagttagagaagatttgcgtcctcgttgagtaaccttcttttcgaagtcagcttgggctaatcgagcttgataagcaacatctaaacgatggagctcattgaagatagtggtcttactaaagcctaagtagttagcgatatactgcaaggaacgtttctcgttatgaagtgtttcgatgacaacgcggtctgaaaatgataagatagtggtgcccataaaggtccttctttcaatggaatgttgtggtaacaccattaaagacctttatgggtttttctgtccacttaaatgttcaacttaaattttacaatctgccactactaaatgtgtactatataaacacgtatttctgatgtaaaaatgttactccagtaagttaaaaacagctattaagttatctaacctttaaataaaagggttgataaccatggactaagacgacagcagggtatcacgcaggaacagcttgctgagatgagtgacttatcacttaattttgtttcaaaaatcgaaagaaaacagaaacagaacattatcattaaaacattgatggctcttgcatcagccttaaatgttaaaccttcagatttgcttaagggtagcaagggcccagccagtaatcgtcgtaagcatgtggatctgcttagtaggcagctatataagttacctgaaggtgaataaaaagcttcctatcgggacttactgttcaacccagcattaaacttaatgcactcttttaacttcattaccccgctccttttaatattctcgttcaaatatttaatcgcaccattaagatactcccgtttaattaccgttttaagatattccaagcgaaatatttaaaaatattttcgcgtaaatatcatttaatcattgcgtttaaatttcatttaccaactgcgcttttcccgtttcaacttcaaaattaagttcaaaactttcccaattccgatctttgacacacgacatatttacagatatgcgcaaaagtttgtcaaaaacaaataaataactttaattaagcttgatatttcgccattatcgcgcagctaaacgcttatcatttttagcgcttcgtgattgcacatatttttagatatgtcgtatctcaattgccagattagaaaaaaacgcttgttaattttgttggcgggtcgctcggttacaaaggtaatcacacccacccataaaacgagtgctttgttctacggctataagccggtatgtacagctaacgcctcaaggcactgacttgtcttgttgttgacttgaccgctttacgaaattaggcagcctcgcgcccgctgaatctcgagccttagctgcctaatcgttgacatcattcaattttttcttgtttaatcaatgtggataaaaaggccgatcaatatgaaaagataatcaacggtctaaaaagtcgtcgtgcaattaaagaaaagcatcttcgggctgatagtaagcaactcgagcaattgagcaaacagattcgttattactcagcccgtcgggccaacttgctgacggaacggtatcgccaaattgctcggcagttgtttgctgagtatgagctaattgccattgaaaaactcgatgccaaagaaatgcgcaagaagaatcagaaagggtcaggggccactaatcggggtaagaaccgtaagctggcgaaaatcaagccttacgaaattgcgttgcttttagagcaaatggccgatcgtgaaggcaaaaccctgctgaaagttgatagttataagaccagtcaagttgaatttggcacacaataccaaaaagtggtgagcgtcaatgggtgtctaagcacactggaaaattgattgatcgtgatttgaacgctagtcgtaatattttaacttgggcccttgatcctaagaagcatattaagtatctcgaacgtcaagcagcaatcaaagctgctaaaaaagctggaatcactaaagacaagttgccaaaagcgattccagccagagtattagttacaacgaattaattaacgggcgggacagaacctcgccgtccgtccccaaaggttttgagagttactgttggcgtatcaccctgagcgtgcaaaacgggtgcgaaacagtaattaagatcaacttgatctcaacggcgcaagccgttgcattgcctaaacgttttctgagattgagcggctcttagcagccttttgatccagaagcgcggtcatttatgactgagtagttcacgccagcgaagttagcacggtgatcatgctatggattaaagggggaatggcagaatccagtgccgaattagcccaaatgttagcagtcattcgtgatcatcccctcaaagaaattgtcggcccggcccatgaataaatcccagaaaaccaaaaattaccgccaacaaggacggtgatcggcataagagagaaagagaattgattagaaggtaaatacttaataccttgtgactatatgttagcgtttacacatggatttgtcaataacttccccgattttatttaaaacggtttcattccttggcttcttgacttgcgcgcctggttatgacctagcgtaggcgaaagggcttgatcagggtccgcagtggggtgtggtccagcccccagactactacgtagcccagcaccaggccggcccagttggtaatcacatcgtcaatatcgaccacccgcaacgtgtgaaccaaccagtccgaagcaaactgggcgctttcaatcaccagccccggcacgagcccggccaaagcaacctgccaccacgaccagtgcggccgccaaaggtagcagtacacccccagtggcccggtcagcaaaatattggccaaaaattccgggtcgacgtggacgaacgggtggaggttatacggcaccatgtaaaaatacgacagggccttgtaagaatctggcaggatcagcccgaccggggcaaagaccagccaggccaccaccattaagtagcccaggctggtaaagactgtcacccgctgggccggcgtccggtttggtaccgccagtagccggtaataccccgctagcaaaatcagccaagccaccccaaacgtcaaccaccgtgtctgcaacatcaaattgccctcttctataaatagttctagcttaccgaacgcaaccggacctgaccaccgttgatccccaagcttaaccagaacttaatttcccagcatttcccgggcggtcgccaccaggggaccaaattcggcggcaaaggagctttcctttaagtagatcaaattcaagggatgctcgagcggaaagccggccagcggcaattcaaacaaatcgccccgggccaattcgttggccaccagggcccggtacataaagctgatcccgaccccctgcttaagtaattcaatgatcgccgtcgggctgcttaaggctaaggtctggcgaaaatcactcagctgggcgttgtgcgccgccagccaggtcgtcaaaatctcgcgggtccccgagccggcttcgcggacgatcaaaagctggtcaaacaaggctggcaatgtcgctggcgcctcggcctgggcggtcacgccgataaagggcgcactgcccaacggggcggcggcaaagtcctgccgcgaataattaccctcgatcaaggccgcatctaattgaccggcgagcagctgctgggacaggacagcggtattttcaatcgtcacttccagctggtagccggccgcgatcaccttggccagcagctgcggcagtaaaaaggcccccagcgagcgggtcgcccccaagcgcaacggcggggtctgggccaagcggagccgctttaagaccgcctgattgtcctgcccgagccgtttagcgtaggccactagttccgtggccgccggcgttagcttgacccggcgcccgtggtggaccaacagcgggacatctagatcggcctccaggctggccagctgctgggagacggccggctgggtgataaagagctgctgagcggcggcggtcaacgagccggtctgcgccaccaccattaaggtcgtcaaccggtggtccagtaaattttccatcgccctgcccctttcataaggaaaactaacttacaagaaagaaatcataatttttatttatcagtctagcatggtacattaagaatgtaaaaaaatccggatgtcaattcggaaaggagaaagtgaaatgctcaagaagatatttagctggccctttgcttgcgccgcgctcttaaccttaatttgttcgctggccggcagctacctggccaccctcccctacctcaaggtgattggtgccttagtgatcgccctcttgttagggatggtgatgcaagttggtcgcccggtcctggattacagccggccgggaattggcctgattgccaacaagttcctgcgtctcggaatcatcctgctgggctttaagctcaatttgattgccctggcccaagccgggatcaagacgattgccctggccgtcgtggtcgtgaccttcacgattttagtcacctaccagctcgcccgccgcttcggggtcgaccgccacttagcgatcctgaccgccagcgggaccgggatctgcggggccgccgctgtgatggggatttcatcgcaattaaccagcgatgacgatccagccaccaagttgcgccaccaggaaaatgaggtggttgccgtagcgatcgtggcgatcctcgggacactctttaccctgatcgaaatcgggctcaagccactcttgcacatgaccgccctgcaatttggggtgatgaccgggggcagcctgcacgaaatcgcccacgccgtcgccgctgggagcgccgggggcccggtcagccttgatacggcgatcatcaccaagctttcgcgggtcctgctcttggccccagtcgcgatcttagtcgggatctggtaccaaaaggcgacccggcaagccaacccgaccggtgaaaagcagccggtgccgattccgtggttcatgctcggctttatcctggccagcgtggccggcacctttatcccgggcctggccgcgttggtaccaagtctggtcaaattagcctacctgctcctagggatggcaatggccgccttggggatgaacgtgaacttctccgtgctcttcacccgcggcaagaacgccctcgtggccgccggaatttcttcggtgttgctcttgatcctggtcgcaactttgtccaagaccttcttttaatccgtaattaaacgctaaaaccgccgtcttccaactcccggaaggcggcggttttgtttaaatcatgcgtcattatctgacttcaactccgtaaattgagcatctaatttagcaataatttgagcgcgtaacgtttcgatccgtttggctactgattcccacataaatttaccattagatcctgatttttgtatgtacctcgaagaagatgatgaaacaaggtacagagctgagtcttataatttaggtcaattcaggctaagtatgtcctggaataaattgatacttaaatataggaacagaactattgatgagttacttgttgtattcatggatagtgctactttcatgacagtcactcctagcctaggttccataagtcccatgtctaacagtgatatgctcacattccaatattacctagctgattcgctagatttcgccgttgaaaaactaatactaaatatgaagagatcatcaattactcctaattataatcaacaatcaaaactactaaaaagaattattatttttaagaattataatcagctaaagcaaattaaatcagttttgcagaagcaggatgaatacatcaagggaaaatgcgctcctacaaaagaacaattagaattatgtagaggcgcactttcaatggatttcggaaaggatacccctgaaatgaatcaagggcatatcgaagttatgtgtgaagaagcaaacgtcagtcaattcataaataattatttacaatcagagatcattaacaataaacgttctcgttgattatcgtacaataccccttagggttgacggcactttaaataataaaagcgctgatcctaaggggtattgtacgactgacgaacagaggtaatttttactaagcgacgatcggttgttatcttttagagttattcacgtttaatgtagtttgaaaatgttttctttataacccggtttgtaaaattaagttagaaaaacaaaaaagccatttgtgatagacttttgagtatccctaatcaaaagaaaggcaatcataaatgacctacaaacatcttaccacacgtgaatcaactctcatagctgaattttatcgtcaagacactcgagcttatcaagttgctaaatcactaaggcgtagtgctgaaacaatttatcgagtttatcgttacttggatacgggcaagacaattgcgcagtatttaaagcagtaccaacggaataagcgccgttgtggtcgtaaaccaatgacgttacctgatgatgaagtaagttacattaccaagcaagttagtcaaggttggacaccagataccattattggtcggtcagagaagaaaatcagttgtagtatgcggacactttatcgcatgtttgcccgtggtcaatatgactttgatgttaagcagttaccaatgaaaggtaatcgtcatccaaatggctacgttgaacgacgtgggaaagctggccatcttggtcgcagtatttaccaacgttaccgcgattttccgcattaccaacatgaatttggtcatttagaagctgatacagttcaagggaaagctcaccatggcgctgtgatgaccctagtagaacgaatctcaaaagttgagattgtcttgaatgtccatcacaaaacggtcgaaagtgtgaactattatttggatcagtggctatcaaaacagcctcgtcatctttttaagtccattacctttgacaacggtaaggaatttgcgggctggcgtgagattgccaataagcatgatatccatacatactttgcggaagtcggtgcgcctaatcagcaagggttaaacgaaaacaccaacggtattcttcgtcgtgatggtctgagtaaaaagaaagacttccgtaattgctagggcttcttttagtaatgaccaattaccaacaaggttacattctgctttatccataaatttgcgggaatacccccacttctataagtaggggatgaatcgctctcttaaagcacgttagtgctttttcttttgttctatgatatatttagtatatatctataaaatgtggtgataacaatagaattagatataaatcagcattcagtatacttacttaattaccatttggtaatggtggttaagtatcgtcgaaaagtaattaacgatgaaatatctgaatatcttaaacatcgttttgtagttgtgggacaagcatacggcattaatttgcaagaatggaatcatgatcaggatcacgtacatgttttgtttagagcaacgcctcatacggaaatggctaaatttttaaatgcttacaaatcgtctagctccagaatggtcaaaaaacaatttccagaaatcaagcaatatctttggaaatcagccttttggacacaaagctattgcttaattagcactggtggagcgcctttagaagttgtaaaacgatatattgaaagtcaagggagaaaataatggttctaaaagctgttaaaatgcgcatctatccaaattcagcacaacgaaatcagctctggcaaaccttcggttgtgttcgttttgtatggaatcaaatgcttaatatgcaaattgaacggcgcaagaataatccggaagctaaatttgtgaatgcctttgggatgaataatctgttgaaacaacttaaggttgagtatccttggttgaaacaagcagaatcaactgctttgcaaagtgctaatcgcaatttagccgatgcttttcaacgcttttttaaaggtcaaaataagttccctcgatttaaatccagaaaatattctcagagctacaattcaaagtacgttaatggcaatattaaagttttagattgccatcatataaagttaccaaaactcggtatcgtctattttagagctggtcgattgccaatgggtaaaattaagaatgtcactgttcgtctgaacgttgctggtcaatattacattactgttttagtggaaagcgaaaaccaaactcttcctaaaacaagtaaatatattggtggcgatttaggacttaagtcgttacttaatctttcagatggatgcaaggaaccgatcaatcattttgaagacaaataccataaaaagttgtatcgttgggagaaattacgtagtcgtcggttcttaaaggctcagcaggaaatcgcctgggatcatcataataaagtgttagttccacggcaattagatgattttaagaattatcagaaagctcgtattatggtggcgaagtatcggcaaaagattgccaaccaacggttggatcagctacaaaaattcactactaaattggtcaaaaagtacgacatcattgtgttggaaaaacttaatactaagggaatgatgaagaatcaccatttagctagagcaatcgctaacgctagctggtcaaaattagtagatatgttgcaatataagtgtaactggtacggtaaaaagcttattcaggtcaatccgtcgtatactagccaaatttgtgctaattgtgggaagaataatcatcggttaggattgaataaatcggaatggttagcggtacgtgagtgggattgtccaaactgtggtaaacatttagatcgtgatattaacgctgcacaagtcatcttgcaaaaaggattagctatccgatagataaagttaggctcgggacgagccttggctaatagtcgtaacctctgcttgaaggttcgttcagaatcggtagggtaagtatgcgatgtttccagaatctcccacttcaagcattaaaccgtaggtttagctaagtgggagtagttcaagaaaattgcaataatgggcttgataagattacattaactggtgaagttcaagatatttttaaggattaatagttatttccctcatcgactacaagttagcgatgggggattttttaatttagggaaaaggctaattcaatctggagtggtgatttgtgataatcaattatagtaggtcgtttgaaaaacagagaggtgaaggttagtggaacaactctatgaccagtttcaacgaaaaattgattatttacgattatcaataacagaccggtgtaatttacggtgtgtttactgtatgccagaagaaggattgaagttcttccctaaagataaaattatgtcccaagatgaaattattcagttagtgcaaaatttcgccaaaatggggattacaaaagtccgcctaactggtggcgaaccattattacggcgggacttacccgagattatccagcgtattcggcaaatttctgaaattaacgacatttcaattacgacgaacgggacggccttgaagtatcaagcaaagaaattgaaggaagcgggtcttgatcgccttaatatttctcttgatacttttaatccagcagtatataaaaagatgacccgtggcggaaatattaagcatgtcctgcaagggatcgcggcagctgaacgagagggctttaagattattaaggtcaacaccgtagtcgtgcggggcgaaaatgaccaggaagtcatggattttattaattatacgaaagaccacccgatcaatgtgcgctttattgaatacatgccaatcggacaagagattagcgattggaaaaaagaatatgttccgctaaccagcatttttgataagtgtcgcgaggcggggttaacatatgaaccgttatcattgcccggtaatggtcctgccgataactatcagattaagggttaccgaggtagcttcggtttgattcacccaatttcagagcggttttgtgaatcttgtgaccgtttgcgaattacctccgatggttacgtcaaagcctgcttatattggaatgaagaactggatatccgaccggtcatcaatgactttgcggcatttaagaaagtagtgcagaaggcgctaaataataagccgttaaatcatgaaatggcaatgaaaaatgttcatcagattattaatccagcgccaacgtggcggcatatgagtcagataggtgggtaaaaatggcagctgatcaaaatactggcgctcctttttcgccgacggaaaaccgggtaatggatgctctgcagtcggtaattgacccagaattaggggtagatattgttaacttagggttgatttatgatgttcaagttgatgaccaacaattatgcgtgattaccatgacgctaacgacaatggggtgtccggttagtaacgtcttgagtcaacaaataattgaacaagctttggcaactgacggggtagcaaaatgtaagattaacttggtctgggaaccagtgtggaatccaagcatgatgactcgctatgctaagattgccctgggaattcatgaataagtaaaaatatggcgtgcagctttcgtgattgaaaactggacgccatattattatttagattgttggtcaaagatgaagtggccgcttttaccaccgtctttttcaacgagatgaacatcactaatgactattccccggtccattgctttgcacatatcatagatggtgaggagggcgatttgcacgacaaggagggcttcaatctcaacgccggtgacgtgcttggtcttaacggttgcctctgcagtaatactatcctgaccgttattgtggaagtggatatcgacaccggtgagggggatgaggtggcacatggggatcatttcagaagtccgtttagcggccatgattcctgccacttgggcgacagcgaggacatcgcccttttttatttggccatcttcaattcgttgcagggtggttgcttgcatatggatttgtccttgagccgtagcggtacggaaggtaacctttttagcggtaacatcgaccatgcgggctcggtcctggtcattgaaatgtgttagtttgtctgtcatgataaaaccccttttaattggtagattaactttaggatagcataatcgataagcaaaattattcagtgattttaccaaaataaaaatgacatcgcctcaacaatgtcattataaaaataattattcgtttcttagtgaagttacttcaacatcgttatcgtagtttggactccaccaaccttgcttattaatgtatccggatggtaagcaccagattacaaattcaataacatcaactacaaaggaaattgcttgtaagacattactatcaccactagctaaaataacggcaattagccagaagacaagcactccccaaccactgatgccagcgtcaatcttcaatattaacggaatacttttattaccttaagaaaagcttaacaatttagatataaataaaattataaaacccaaaatgtcaatttaagttagaaagaaaatagttgctcatcagtgacgtaagacatgaatacttcatatggagttcgatagcctagcgatttacagggcaggttatttcgcttactcatcagttaggttaccaattcatcaggaagattgcggaaatctagctgtttcgttaagccatcccggcgtaaaagaccgttgttgttttcgttcagccctcgttgattgggagcaccaacctcggcaaagtaagtgtgaaggtcaaattgattggcaatctcgcgccagccggcgaattcttttccgttgtcaaaggtaatcgatttgaagaagtgccgcgggaatttccgaagccactgacttaagtgttggttaatcgcatcagccgtcttttcgtgcacattgagtacaatttcgaccttcgattggcgttcggtcagggtcattgccgccccttggtgctttttgccttggacggtatcagcttcaaggtgcccaaattcagtggcatagtgcggaaagtccttggcacgctcgtgaatacttcgcccaattggccagccttcccgcggcgctcgacatagccattcgggtgccgcttacctcgcatcggcaaggaacggacatcgaagccgaactggccacgtttaaacatccggtaaagagttcgcaggttacaactaattgggcgctcagcgcgcccaataatggtatcaggcgtccacccctgggcaattttgtcgttgatataagtgagttcagccagtgacaactgagtacgttttcggccacaacgttgcttattgcgcatatagtgatcttgataatcagcaattgaggcaccggtttccaggtaacgataaacgcgataaacggtttcggcacaacggttgatcatttgggccactcggtacgctttaagcttttgcacgaaagaatgggcgatgattgtcagctcgtttgtggtaagatgggtgtaagtcatttgtggtttcctttcttttgtttaggggtattcaaaagtctaccacaaatggcttttctatttttctaacttaattttacaaacggcgatcttgtttagaggaattagtgagaaaacctactgactatagataaaaatttatgtccccgttaaaaaatgatgtaaaaattcggggcaagtcataaataatgatataaagccactagtaacacatattaaatgatactagtggctttattatttacattggttgtccagttgagatttcaaagccggctgttacaggaattacttctcccgtgattgcactagcagctgggctagccacaaaataaattgcagcggcgacttcttcgggttcaacaatccgatttaatggactgttttttgcgaatttttgtttatcttggtgaaaaagcggggtattagtcggaccgggtgcaacaacatttacgcgaatattatttttaccgtaatcaattgccattgcccgagtcatgttaataatcgctcccttggcggcattataagcaaccattgctcgatcaccagccattcctgagacagaggaaatattaacgatactaccatgatcttgttcaatcattgttggcaagaaggctttgctaacgaggaaagttcccttaacatcaacatcaaagattttatcccaatcttcttcactggtttcatgaacctcgccgtgaataacgattcctgcattattgataatcgcatcaacggttttaaatttattgagggttatttgcttagcatgttcaacctcacttgatttactaatatcggcttgaataaaagcaatttgtgccggggaatacgtttcgcctaattgtcgttcaacttgcatccccttttcggtatcacgaccgataagtaccgtattccatccatttttaagaaaaatatcagcagtggcaagaccaatcccagaggttccaccactaataacaactgtctgcatatataaaactcctctctaagcttttctctaattatggcatttttggtcagatttagctatttattagaaaagtccttataataaaataaggataaggagggaatataatgaatacagcaaccttagaagcacttcaaaattggcttcatggacgtggctatacattagaacaagtagacgcacaactaattcttaaatatcatggacaagaacgagcagtcattacgccacctgatcgctatcaagtgaaagaccttgacctgaattttaatgactgggttgaattcaataagtgcattcgcaatattcgccattctttagctagtaacgaatagaaagccttttctttggcaagaatacctcctcgtgatagagttattcatgaagggaatatagtccaaggagggatagtcatgataagagttggaataattggtgcttctggaatggcaggcagtgcaatctataaattagcatcgacaaaaaagatttgaatgtaactggaattgttcgaaatgagagtaaggccagaaagatccttggtgatgatgccaatttgatcagtggtgatatttttgccttaagtgataatttgttgtcgcggtttgatgtaattgttgatgcatatggtactagtccagagaatgcggatcggcaagtaagactggctgagaaattagtagttttagcccgaaaacataaaatccgtttaattttcatcctcggtgccggaagccttaaaactggtaaggataagcatctatttgttgatgatattgaaaagatgcctggtgctgagacatggattaatacaccccgccagcagttaaaagaattacagtatcttgaaactatttctgatattgactggctaggaatttcaccatcggcagtatttgaagctggggttgcgactaattatattcttggtcaggatgaattattatttaatgaacaaaatgaatcaaaggtaactgcaggaacaatggcaaagttagtggtcaatgaaattttagcaccacgccaccatcgtgaacgaattaccgttgttgatgcagaatagttattggaactataaaaggcatgagaacgcaaatcaattctcatgccttttaatattagtcaactaattttccaataattggaagttttgaaaccggtgaacactttttggctgcttgttgataggtgacatctgataaatcatggccgaaaacattaccgtggatttctgcgcctttccattctggaacttcagaaacatcataaacatttccacgcaccccgatatatactggacgaccttcttgcccgttatattgcgctaattcattgtgagtaaatgaccgcataataatccctcccataaagaagctgggaattgactcggcctcttcctgtatgagtgtaatgagatatgaaaatagatgacaagtttattcgttatcctatcaccactataacacgaaaatggtaatgacatcggaaattcaatttattcagttgctaagtttgcagcagggcttttgactgagactttcacgagcattcctgcaatgatagttaggatcgtaacgaggaatgggaaaaatgcccaaggaatgaaacttaatggattgatttgtaaggtactagcgatgaataccccagaaacactccatgggacaattgcgttgactgcggctcctgcatcattgagaatccgggttaaatcaacccgctttaagcctaatttgtcaaatgatgggagaaatgattgtccgggaagaataattgcaaggtagtgttccccaacaaggaggttaaccccaatacaagtaagagctgtggagaatgttaaccgaccaggtgtctttacaatcccagttaagtgattgatgatagcgctaataatattgaacttgatcaataagccacctaaagcaagcgcgaagataattaaggctagagaagtaagcatactagagataccgcctttagaaagcaatgtatcgattgttttatcaccggtatgggagacgtaaccagtcatgatggtattagtaatcgtagtgaggctggttttaggtgcatgaatccagccaagtacgaccgcgaagagtgagcccagaccaagggaagggatagcaggaacttggaaaatggctaatacgattaagagcagaactgggagaagagcccatccagagatccagaacccactttgtagcccggccatcatttggtgaacggcgcctaaactaacatttttggagtttaaccctaagaaagtgtaaagaataagacaaattgcccaggcaggaatatcggtggtgagcagggatttaatatgcttgtagatactaatttcaccaacactggcggcaaggtttgttgttcctgaaagcggggaaatattcgaaccacaaaaggcccctgaaacaattacccccgcagttaaaccggggttaattttaagagttgcgccaatgccaataaaggcgattcccattgttgatacagtagtaaatgaacttccacaagcaaccccaacaagggtacaaacaataaaaactgttggtaagaagaactttacagaaataatctcaaacccaaagtacataattgttggaatagttcctgagaaaatccaggtggcaattaagacgccgatagaaagaaagataatgagagggtcaacaccggctcgcaaaccatgacgcattccccccatcacggtatcccatttaaatccacgaattcgcccgtaaacagcaagcaaaacaaatgaaataaataatggggcttgtggttcttggtgcttaaaaataatagggtagcctaagatgcataaaataacgccaagaataagtaaactttcactaaaaccaatcactggctcaggactattttttgatttgttaatagttttcattgtgtaattctccttattttttaataaaaaaataccaactagatcagcggcatttacttaatctagttggtattacggtagtataaaaactcgcggaaaactacacgcccttactagatcaatgtacctagcaaaggactcattaaaacaaccctgcttaggtacgaacaccgctgtccgtacctaaatgagtacagacaattatgcacggtaagcatagttgttataatacttggttgaagttaatgagtgttgaatcatgttagtcgttcctttcaagttaagttataattattaaaacattctaatttgattttgtcaaactctaattttaaaattcgccagaaatatccttatcagaaaatgaatgagggtcggggacaaaagaaatatcagtgtcaattattccaaatttttctcgcattacattttcgatgtgctctgataattggaaacttttgaggatcgtcattttagcgttaaccatcacggaagcatcaagcgtgaccacatttccgttatagtgagcttttagttcgacaacttttacaacgtgtggaatattggtgattgtttggcggtattcctgttcagcccgcggatcaaagtagtcggttaagttaagactgctttcaaagaaaatttttagtccagaatacagaatgaagaaaccaacgacaatactagtagcaccatcaagccaacgaaggttaaagaggagagcaccgccaattgaaatcaaagttccaatactggtgaaagcatcactcaggctatcttgggcagaagcaagcaacgcggcgttttttaatttaagccctgtttggcgattcatataccaaacaactaacataataactgacgcgattccggccccaatcaatgcgactggttggggaaccacccgacttgcaggatcgaggagacttttaatgccatcgatgataacgcttaaggcaatcgcaaccataacgaccgctgtgacaagggaaaaaattgtctcataacgccaacgaacgaattgtactcgctggtcagatcccatgtgcgcttgataatttcccgaaggcagctgtgcgccgatgatatcatcatcatccacatcctgggcaatgtgtaagcccatcatcaataaaaaggtcgagataattcccgaaaggttgttaaaggcatcggctcgtaacgtctgcgatttacttatttcagctaaccagtactcgataattgaaataacaacataagcaatcaagttatagattaaatggtgttgggaagctcgaatctttgctagttcatttgcttgcgttttttcccagttattcatttcttcggttgtatgtcttttaaatttagtcattaatttaagaacttccttgattaataaaatcagtttaattgtaacgcaaaaaataaaagccgagaaaacgattttctcagcttttactcaaaataataatgaaaataattgctaggcccggttattaattacgtgggcgcatgttgcaataatcagtcccataaaacttactacagcgatcatattactcataattgacatcatattgaacaactcctttacataattaaaatattttttacagcacaactaattacagttgcctttttggaaaacaaattataatgattgttttcccctctccaccaagtattgtaacaggtcttagcaatagtgacgataataattagctaagcttttaatgagcttttctacgaaagaaaggagtgattataagcaaaatattataagtaactatcatatgaattaatgatttttaattattaagtcaaatcgaattatttctttataaaattaatctatttagctaatctgtttaattcttttaaggctagaggaaattttgtgaagccgtcactagtcaaaaagtggccgcctttttctttaactatgagttttgctctaattttattagcgaccgcaatgctattttgataaggagcgattgggtcatctttagctgttataacggtagctttagcaagtttagggagtatatgctcataatgaggctgatctttcataaactcatctaattcaggataagctggtaattctttgtcaaatgctcccacaagtaaaagtcgtgcatctttaacatgatgatgttcaatataacgaagggcggtaatacatcctaaactatgggcaacaaggatgaggttatcttggggatgaatttggtcgtcaaccgcttgatcccattcagcttgttggggattaaagggatttggtagccatatccgatcaagggtaattactggttttgcttcttcttcgagccatggaaaccagtcatcatcacgggtagacgtaccatgaattaagtatgcgttcttcattattaagactcctatttcataaagtgtttcaatattaccatgccgatgattaacaataaaatggcaatcgaattagtaagaatttcataaggctgaccgtgggcggcaattagtccccggattaaagccataattcctaagcttaataggaaatcgaccgcaattcggccatgatgttttagcgcggcaattatcattgtcataaatgaaaagaaaaaagacaataacacgatccaaaatcttaaaaataacatgatccgtattcccatcttgcataaggggaatcagccaaaaagtttccgtaaataagataatagttaataaaatccctagaattgctagtgcgccgattgtacatagacataaaatatggctaaaattagccgctaatttatatatttttttcattctcttatactcctcaagaaaacgctttaaccttaggatagcaatgatcaagaaatttagctaatatttaacaaaatagttgttaaaaatatgcgatacttaaagatgaatactaaaaggaggggcgaaaaatgcgaaaaccctttattgatgctaattggaagatgcataagaatgtccaggaatcggttgaatttgtggacgcaattaaaggaaaactgccagatccgcaagaagttgaagtcggaattgcggcccaagcttttgcattaccgagtatggttcatgctgctgatgattcagggttaaagataatcgcgcaaaacgcggcagctgaatattcgggagctttcactggtgagattagcttacgaggtttagctgatgccggtgtttcatacgtaatgttagggcatattgaacggcgccatttattccatgaggataatgagttggttaatcgaaaagtgttggcggcccttcaaatgggtgttaccccgataatctgtacggatgaaacgatggttcaaaaagaagtcaacggagagattcattacgttttccaacaattaatgagtgtattgaggggcgtttctcttgaccaaataaaaaatgtagttgtttcctatgaaccaagttgggcagttggatatggtcagcatgctaatccagttcttgctgaagaaggatgccgtcaaattcggcgaacgattgctgataactatacttatgagattgctgataagatcaggattctttatgggggcagtgtcaatccagataatatcggaatgattatgaacaagccggatgtggatggagtattaatcggtcgggcaagtttagatgttgataatttcttgcgaatggtcaattatcttaaaaatgatcaagaaaaataaaaaaagtatttctctttgccgtcattttatgttatagttattaacagttgttatggcggtattggtgaagtttggttaacacaccggtttgtgggtccggcacgcgtgggttcgaatcccacataccgccctgacctagcgcgatagcaaaggatttttcctttgccatcgcgtttttttgtattctctgttttatgaattttaattgataacatccaagaaagtaacttaaaatagtaagatggagaaagaaaaaggggctttaattatgaaaaacgtacaaattggtggaacaagttggaaagtatcgaacgttgcattaggtattatgcggatggggacgttagcagtgactaaagcgattgatgccttagaagccgcccacgatgctggaataaactttattgattcagctgatatttatggcaacgacccacagttaggacgtggatcttcggaaatccattttggtgaagcattaaagaaaagcagtcttacccgtgatgacttttacattcaatcaaaaggaggactttttgcgaacgcggataataaaataacgcggtatgattcgtcaaagaagcatttaatcgctgctgttgatggaattttgcaacggatggggattgattatcttgattcatttttgattcatcgtccagaccctttaatggagcccgcagagatagcagaggcctttgaccaacttcaagcatctgggaaagtccgccattttggagtatcaaattttaacccgcaacaaatcgcgctccttcaagcggcgacaaatcaacgacttttgattgaccaggtacagtttggcttaaagcatacggggatgattgattttggcctgcatacaaatatgactgatgatgctgcaatcaatcatgacgggggattattagaatatacgcgtcgtaaacagatgacgattcaaacatggtcgcctttccagtacggtacatttgcagggacgtttattaataatgatcaattccctgagttaaacgcaatgttagaaactcttgcgcaaaaatataaggtaagtaaaaatgcaattgccgttgcatggattttacgtcaccctgcgcatatgcaagtgttgcttggtaccatgacgccagctcatattattgacagtgctaaggggagcgatattacattgacgagccaagaatggtatgatctatatcttgcggccgggaatgatttgccataatgaaaaaagattatctccagttctatcagcatattacagctcctttttatcgatacccgtggacaattcctttattacgggcggttaataaatttgttgtgtggactatgtacgttgcttacatcgttatattagtgtgggtagggaaaaataatgtcttgaaagcaggaccttttctgcttattcccggtattggctttatcctgctttcttttattcgccaacgaattgacgcaccacgaccatatgaagaattttcgattaaccccttaattctacgtcaaaaaactggtgattcattgcctagtcgtcatgttttttcggcgactgttattgcgatgtgtgggttaaggttaaatttgattttaggagtgatcttactcgttttagctgttgtttctgctattacgagagtgattggcggagttcattttcctcgtgatgtggttatcgggtttatttgtggctttatttgtggttcgtttttatttcttgtctaaattttagaaaggtgtatttcatggacaattcagtgctgcaagatgcaattttgaatggacttattagtactcaatatcaaggtaatacgctgctaggtccgcaattattaaccaacaaccaatcatcgacaatttggcaaacgttacggcacgaattactgtcatgtaaagactttacgtggtcagttgcctttattacgttagatatgttagtcccctttaaggcagtgatggctgacttagcacagcaaggagtacacgggaccatcattaccagtaattacttgaattttaatcaccccgcgatgtttgaagaattgcaaaaaattcctaatttaacggtcagaattgctgatcttaatggatttcatactaaggggtatttatttgatcatgggaaatatcagaccgtaattattgggagtgctaattttacacggtctgctttattagttaataaggagtggaatttaaaattaagttcccgccaagaaggaagcttttttcaacaactaacgacggaattggatgctgttaaacatgagagtactgttctaacgtcagagtggattgcggagtatcacaagaattggcaaccaccaaagactagggtgacgcaaccagaaaaattaaaaccaattgaacctaatcaaatgcaacaggccgctttaggacaattaagcactctgataaaaactggcgctaagaaaggattggtcgtttcagcaacgggaactggaaaaacatatctgggagcatttgcggttaaaaaatatcagccgcgccgtttcttatatatcgttcatcgagaacaaattgcaaaaaaatcgttagctagttttcgacgagttatcggcggcaaaaaaactgattacgggttattgacaggtaatcgccatgattggaatgctaaatatttatttgcaactgtccaaacactaagccaacaagcagtactgaataagctcaaagctaccgaatttgactacattttgatcgatgaggcccatcgtgcagcagcacctagttatcaacgaattttaaaccactttatgccgcaattttggttggggatgactgcaacccctgaacgaatggacaatcaagacgtatttaaactgtttgattatcatttagcctatgaaattcggctgaaagatgcattggctgctaaaatgttagcaccattccattacgtgggggttaccgattatgaagttgatggagaaattattactgagacttctaagttaaaccaattgattgctgtaaaacgggttaattatgttcttaaccaattagactattatggatattgtggcgatcagccccgtggattagtattttgtagtcggcaggcagaggcaaaagaattggcagtccaatttgccgcggctaaccatcctgcaattgcattgacaaatcaaagtagtagtcaagagcgagcaaaggcagttgagcaattagaggcaggaaagattgagtatatcattaccgtcgatctttttaatgaaggggtcgacatcccatcagtaaatcagattgtaatgatgcgtaatacccaatcaccaattgtgtttattcaacaactggggcgcggcttgcgtaaatatcctggtaaagattttgtgacagttattgattttattggaaattaccaacataattacatgattcctcttgctcttaaccaggataatagtcgaagtaaggatcaagcgctccgtgaagttaaggtgccaacgaattttgacgtttcaaccattaactttacgaaggttgccgaagaacaaattttagtctcccttgataaagttaaattggactcgatgcgtgaattgcggcaggcataccatgatttaactaaccaactagggagaacaccattgctggatgacttttatcgttatggttctgttgatcccgagtatttgcgcaaaattcccagctcaaccattatggtgacttcttagaaaagatggggatagaacttaaattaacaaattatgagcgtcaagtactagcctttttaactaaagagttgcttaacggtaaacggccacatgaattgattctccttcaacgcttacttcgcggtacgtgtttaattgatgcttttaaagcagaattaaagcatcaaaatattcgcgttacaccagctgttttacaatcagttgacgatattttaagtttgcaattctttaatgtaaaagctggtaaacaggtaaaaaaggatcagtatggcggacagccgattattgatcatccagatttgttaacgtatcagttaaattcaaaaattcgagcaggactagaaagtcacaatgatttcaagaggttgtttatagatgtactaacaacgggacttgaaatcgctaagcaatatgacctcaagcaagcatttaccctttatcagcaatatgaccgcaaagatgtttgtcgtttattaaattggcccctcgatgtaagtgcgccgttatatgggtatcgagtggcagaagatatgtgtccaattttcattacctaccataaggatgtggaagaaaaaagaaatgctatttataataatcaactacaagatggacgttcattgcgctggtacacacggacacctcggcatctttcatctgatgaggtccagcggttgcttgcaggagtaaaagagggtaagccgcaagtaaaattacacttatttgtaaaacagagtgatgcagttggcaaagaattttattatttaggtcctgcttatattcaaccggactccgtaagagaagaattggttgggccaaagaaaaaagcggcagtggggatggatttagttttagaacatccattgacctcaactatgatgaacctattggcaatgtaaccatcaatatatcgcttttattttttgctaaatcttctataattaaaggcgtagaaagaagatgcatattatggcaaaaggaaaggtaaaaactagtgataagcgttcagttcgggatgttaaattagatgaattggctggcttactaaatgaatttgatgtcaatacgataggagcactagtaaagtctctaaagaagagttaaaagaagaacaagcaaagcaagaaagatgaattacgtgataccattgaacgataacaagaacatatcgatgaacaaaaagacacgattgatcaacttaataatcatatttctaaactaattgatcgtcttgataataagctataaaaaaatgaggctgagaaaaaacttttgttttttcaacagcctcgtttttcatacgaatattgttacgatatcgtggaactagccttgagccttgtcgaggagattatttctcacttctatttcttatcattcttttttatttactggttgtttaaataaatcattaaatgcttcactaattgttgggtgggtatagatttggtcccgaagtatttgataggggagttttgcccgcattgcaagaacaatcatgttgataatttcttgcgcttcctggacataaagggtagccccaataattaagttcgtttgtggatcgactaataccttaagcagcccacgggtatccttcaatacttttgcttttggaattgcggcagcaggcatcttaaagagtaggtaatctttcccttgtttttgcgcctctttttccgttaaaccgacttgtgcaagggaaggttcaataaaaacattggttgggacaattaaacgatcactaactcgccgttctttattaccgaataattcatctttaataattcggaagtcgtcaagcgagatgtaagtaaattggggaccacctttaacatccccgattacccacacattaggaacgctagtatggaggaggtcatcgacaacaatcgcgccgtttttagcgaccttaatatctgtgttttgtaaatcaaggtccgccgttgcaggcttccggccggttgccactaaaattttatcagcgaaaatagttgtttcacgattatcagctctagcaaaagtaattgcagcttgctcatcttgttcgctaattgccttaatatcaaccccaacttcaaagcgaaccccgttatccttaaagttttgaattaccatttctgccacatcatcatcttcacgtggtagtaaagtctgatggtgatcaagaaccgtgacgtgtgaaccaaaggaagtgaacatatttgcaaattcaagaccaatataaccgccaccgataatcacgagttcacgtggtaacttaggctgctccattgcttgggtagaattcatgagaaatggactactcttcaatccaggaatatcagggatggttggtgttgcaccagtattgataaaaatacgttcacccttgtaggaaagagtttgcccatctggcgtttgcacatcaatcgtgtggttaccagtaaaatgagcagttccatctaagacagtgatattttcttcgcttgctagcatttgataatttttttgtcggagttgggatgtcattacattttttccatcgaccgcgtcttcaaatgaggttccatgagcagcttcaataattagccgtttggaagggagacaagcaatattaatgcaggttcctccatacatttgcttcgatttttcaataacaagaacttgttctccatgttgagcgagaaacttcgcaagcgtttttccgcccttcccaaaaccaatgataatatttttgactgttttcatggaagaaacctccaattttaattattttatgtaccttcaaattatactaagaataaacgctttgtcacttaaaacgctcaaataaggcaattgtgcagtttgcgttatattgaacaaagtgttaggataatatcgtaaatatattagtcccaactgcagtcagaacttgtatattaaagaaaaacgtattagatgaacattgtatattattgatcatagatggtgcttcatcaaaataaaacgttttactaatttataaaaagttttgattgaggagagattataatgaaagctgcacacttagtagaacactcccaaaaagcaaatgaaaagaagcaagttattcaagagaccaagtttatcgacattttaagcaaggttgcaacagtcgtagctattttgatgtatgtatcttacatttcacagattaagaataatttggccggaaattacggtgctcctttacaaccattagtggcagcgcttaactgtacgttatggtgcatttatgcttacttcaagcagcaacgtgattggccagtcttctgggcaaatttccctggtattatctttggcttaatcacttttatcacatgtttacactaggaaaaataggattgcgagaaaacaaaattttctccagtcctattttttatatgctaactctcaactctatgatataattaaccgaacgtatgtttaggaggagtagagatgccaaaagatgggatgtcggtagttcactttagttcttttgcgccggtgacagagatgattttacagtcgttgccagccgtgaaggacaaagaggaccagaaagcgccggccattaaaaactttgatcaattacgtcaacgattaaatagtcatgcgcgattccttattttggaccttgagttttttcaggatcagcagaagcatcgaaatggcgttgctcagattgcggggaagatgtttgaaacacaaaacagctttaattactacctctatgcccagaatatgtctgctgagcgacaattggcctttttgcgacaatatgacctccgcctttcagaagtaaacggatatgaggttaggcagatttttaaccggatttttcatttcattgcggtagagcggcctgactatattgtaagctgggataatggaactgactttgaatcattgaattatgaagcaaatcgattaaagattaggaaagaggatcgtccctggcgtacgattcagtcgttagatctggaaaagctagtcgctaaagaagtatggaaaagtaaaagtgggatcagcctggaaaagatgtgtcgtttattgcaccttccccgggttaaatatcatcaagcccaaaatgatgtgatggcgattgaacagatcttgaaattttatgcttgtgatttagagcgtgaattaaattgtcgctgatcgttaccaaaatttaaaatttagttcatgatttatcccgattgactttttattattagtaataattgaaagaaggtgaacgagataaatttcatttttcgactgcttaagcggatatttataataggacttttagtaggtggaggatggctttatttcaatgatgcacaagttcaagcaacggcgaaccaaactgcatggaacgttcgtgatcgcattgctaagttaattggcagagacgatacaagctcaaacgataattctaatctgcacttaaacgatacaaacaatggctcttccaaaagtgaccaagaaccaacgacagaacaacaaacaagtacacaaacttcaattccatctactggacgatgggcgactaatcaagcaacggtctatgtaaatacaaataatgctcaacttgacgcagctactaatactgcaattcaaagctggaatcagactggggcgtttacgttcaaaccagtaaataatcaaagtaaagcagatatcgttgttacaacaatgaaccgttctgattcaaatgctgctgggttaacgaagacgtcctcgaattcgttgacaaggagatttatgcatgcaacggtgtacttaaatacatattatttaactgacccaagttatggctatagtcaggaacgaattgttaatacagccgagcacgaactggggcatgcgattggacttgatcataccaatgctgtttcggtaatgcagcctgctggatcattctatacgatccaaccagatgatgtgcaagcagttcaaaaactatatactaataataaataaaatggcgagactgaaagaagtaaatttctctcagcctcgctattctatttagtctgtcattttccgtgcttttagtgcccataagatagagacagtatcaattatttcctgtaacatggcgccgaaaaaggccggaatgattccggtgctagcaataagcattaggatagtacagattgcaattccgattaggaccgcctgttttgcaatccgcagagtttcctgagaaatgctaacggcttttgcgactcgcgaaaggtcatcttttaggataacaacggcagctgattcactagcagcggttgatccgtgagctcccatcgcaattccaacatcggctgtcacaagagaaggtgcgtcgtttacgccgtcgccaaccatgaaaacaggatgttcatttgttggaatggctttaagtgcattgattttatcttgtggaagaaggtcggctttaacctgcgtgatcccgacttgttgggcaactttatctgcaatgacagcttggtctcccgttaacattaatagattggcaacaccaagccgttttaaccggttcattgtttgctttgcttcaggacgaatatggtcggtaaaagtaattgcaccatagtattgcccatctacgctcacatagatagctgttgctgctaacatctggtcaagattttcaggagatacgaattttaattttcctactttaacttcccgcccatcaacagttgctaaaattcctttaccagttaattctttaagttgatcaacggttgataagaaaacattatatgcagtggcataagaaagcagtgagcgtgctaggatatgtgatgattgttgttcagcacttgcagcgtaatggaggagctgcgttgagtctatttttcctgtagggaggattttatcaacggtcaattgaccacttgtaatagttcctgttttatcaaatgcaccagttttagcaactgctagtttttccagtacactccctgttttgacaacaattccatttcgtgaagctcggctcattccagaaaccattgccacgggagctgcgaggattaacggacatggtgaagcaacaacgagaacttccgcaaatcgttcgggacgaccggaaaatacccatgcaagtgaagagataataatagcaataatcgtaaatggaacagcgtatcggtcggctaatcgaacaaagtgggcaggagtcgattcagcctccttaaccaatttaacgagttgctgatattggctatctttggctagtttggtgacctgtaaagtaatggcattatcaccattaactgatcctgacatcacttcgtcaccagctgtttttgaaactggccgtgattcaccagttaatgacgattcgtcgaacaatccctcaccatttttaataattccatcgactggtactaattctcccggtttaacgataagctggttgccaactttgacatcgttaactgggatgtcgctagttttgccattggtgattaaatgtgccgtttgcggtgagttattaagtaatgcttttaattcggtgcttgcttttttggcagcataatcttctaaggcatctcctccggttaacattacaagaataaccatcgctgcccagtattcgctaacagctagcgttgcaacgacagccataatagcaagcagatcaacgccatatttaccgctacggatggtttttatcatgccaataaacattgaaaaagcaacaattgcgccgacaacagtaaccagaatttgagcaaaaagttgtaaatgaaatccaaattggagcacaactgcgattgctgcaattactaggatgatgattaatttttgcttattagatagttttttcataatacccccgcttagtcctcgtgctttctacaatttaattatagggtttttatgcaatgatataataaaaaattagaaatattaaggaaactggtgaaaaataatgcaaaatggacaatcttatcaacgaatttttgtagtgataattgattcattagggattggagcaacggctgatgccaatcattttgagagtttaggggctgacacactaggacaccttggggaacattttcgagtacggctacaactaccgacttttcagaaaatgggtcttggcaacttacacccgattatggggatgtcttcgcttgaaaagcttcacgctgcttatggtcaaatgagttcaatttcaacgggcctgagtgatcgcgagagccagtgggagatgatgggcttagcaacgaccgctgaacctgacgtttttattgatggtgtgccgttggaaatagcgactaattttgcgcgaaaagcaaagcgccctcttttaagcaattccttaatgaatattcgtactgcgttgaaagattatggccttgaacaattgacaacaggtggtctgctagtagcgacggctagttcttcaagtgtttggttaattgcgcatgaacagactatttcggttggcgaattaaaagaagattgtcagattttgcgaaaaatgttggataattccccatatactatcgaaaatgtgaatggccttctttttagtgggaaccaggcggctaatttttatccccaagaactttatagatttcctttagctccagcaagtccaacggttattgattgtctcttggaagagggttatgctgtgaagttaatcggggaaagtacccagttctttggtttggaccataatgaaataaccgggaataatcaagagagctttgttcagttgcaagaactgatcgagaaaaagtttacaggtatttgtatagcagaagtgggagagatagagcaatttggtaaagcacgtaatcctgaaggctttggaacggaattaatgcggattgaccacgaacttacaaaagtcatcgataaaatgcaagatgatgatttactgattgtgacggggaacttcgggaatgatcctacttatcctggtgaaaaacatactcgtgaatatgtacccttacttataacagccccgcaaattaaacaaaatatttctctcggtggcagaagttttagcgatattggggcaacaattcttgataattatgatttaggagataagttgccagttggtaatagttttttaagaaaattattttctgcatatagataaaagaggatggaaaaattctgattttccatcctcttttatctatattaacgatgaaatttatagtaaatagcaattcccataatcaaaagaaggacaagggcagcaagacgcgggtttgttttaaataactcgtgcattgcatgaatttgtccaataccaaggggaagagtaaacatagaaaagacaccctttcaaaatttacttaaacgcttagtagttttttataaggaattctttcatatctgttggttgatgtccagtgatatgcgcaaagtcgtcagtgacttggttcatcaagcccattgcagctgcttggtacatagaagcaagttcgtttccgtcaccctcagcagcgtaaatttcagcaaatttttttacggtaacgggatcgtaaccaatttcttcacccgtaacattagtcataatataactaagttctggcattgtataatttttgctcatggtaaggagataattttgtcccttatctcgcaagtatggcttgactgctacattggcgatggcttcagcgctatcttggcggaaataaaactaacatcgactaaattatgaacatctgccttaaacattgcagttagtgaattctcgaattcgtcaattcgatccttaactaagtaggtaatacttggaatatagataacaatatcaattccgttaaaggccgctgtcatcttagcgacgtcatagtagtcaattgccgcaatttcgtatccggcatctttgaattgggaagcttttgcgggattgtgaacgccaacgcggatattatctggagatataagcttgcttaattgcttaacaacgtgttgaccaaggtgcccggttgccccagtaaccatatatttcattattaattccttctttctttttcagcatcttttagtgcttgcttaacgcgaatagtgtcgatgacatcctgtaaactgattcttgcaagtttagcttttgctgctgtttctgcttgctggtaaaagccatcaagcgtctcttgaatattcccgccaacgatgcattgtggatttgttcgttcatcaatcgtaaatagatgagcatctccttcgatcgcaagaaaaacatcataaagtgagatgttttcaggagattttgcaagtgctggatctgctgcaccatgaacggtattgattaatccggctttgttgagcgcactcatcaaacgtcggacgacaactggtgaagtttcaatgctgctagcaatattattacttgttaatggaataattccttgataaatattaatgaaagcaagaatgtggatgctatcactaaaacgggttgaaattttcatattatcattcctttaatgctaattgtaatttataaagttacatgatgtcaagagattgaatttatcattgccttgacaattatttgttttagatatagtattagtttattgattgaaacttttttagttacaagctaggagaaaataaatgagatttaagaaaatcgttgctctttcattattaagcattgctggcttactagcagggactattacgccggcagtagcaagtgctgccagcaataaaccaattattgtgggttcaaaaaatgtttcagaaagtaagactatcagtgaaatttacgcgcttgcacttgagcatgagggttataaggttactcggaaacccaacatttcaaataatgtgatttttagtgcaacacaaaaaggcgaagttgatgtttatcctgattatacgggcacaattgtagaggcgtaccttaaaaagaaggggaccggcaagagtgctagtcaaatggctaaattagcacacgatggtattcaaaaagacggcttaacgacatttaaatacgccccaggtgataatcgccaaggtgttgcaatgccaactaaggacgcaaagaagtaccacattaccaatttaagtgaactgcaaaagaatgcaaagaagattaactttgcttcacagggtgagttcgaaaaacgtgctgatgcccttccggaaatgaataaggtttatggtaaatttgattttaagtcaattaaggattatgacgtaaatttactctataagattatggaacaagggaaagcacaagcagctccggtttcaacaactgatggtcaattagcaactgacaagtttacgttactaaaggacaataagaatatttggccaccatataatttagttccagtagtaaataaaaaagctgccaaaagtcatcccaaaatggagcaagccttaaataaagttgatgcaaagttaacaactaagcaattaacagatctaaacaagaaagttaatgtcgatgggcaaaattataagactgttgctaaaaattggtataatcaaaatatgaaataagtgccaaaggggcagatagctagtttttcttgctagatatttgctccttcgttataggcaatagatggggagtggtagcttgctagggcaaataattcagtattttcaaacaaatagcggccaatattggcaatatgttggtcagcatataattctgactgttgtaacgctagtgatttcaatgatcattgcattgccattaggatatattggttcgcgaataaaaccagttgctcaattttgtgtgatgtttgcgcaattgttacgaatcattcctagtttggcattgctgtttctattaattccatttattggaacgggggttgtccctgcgttaattgctttaattgttttagcgcttccgccgttgctaatcaatacaattctcggttttaatgaagtgagtccactatataaggaagttgggatagccctagggatggatcagcgccgattacgtcggcaaatagaaattcccctggcgttgccctatattttaaacggaataaaactagcattggttgagatcattgctagtgcaaccttagctacttatattggtgctggtggattggggaccctaatatttactggcttaggcttatacgatatgagttatgtagtgattggcgcggtaagcgttgctattttatccttgctggcaatgattagctttgattttttaattagaaaggtacaaaagcatgacagaaccaattattcaatttaagcatgttgagaagcgttttaacgatcaaatagtgattcctgatctcaattttacagtcaacaagggcgaatttataacgattcttggctcatctggttcggggaaaacaactaccttgaaaatgattaatgggttgatagcgccaagtgctggtgaaatcttagttgatggacaaaagcttcgagaactcgatctagtaaaattgcgccggcacatgggatatgttgtccaacagatcgggttatttcctcatatgacgattggacaaaatattgcagttgtgcccaaaatgctgcattgggataaggaagagattaataatcgtgttaaagaattactaagtcttgttcaactaaatcccgctgaatatatgaaccgctatcctcaacaattatctggtgggcaacaacaacgcgtaggagtggcaagagctttagcgactaatccaccgtatgtattatttgatgaaccctttggcgcgctggatgccttaacaagaatggaattgcaacgagaagtaaaaaagattcatgaatcgttggcagaaaagacttttatgtttgtaacccatgatattaatgaagccttatttttaggtcaacgagtgatgatcatgcatgaaggacgcatcgttcaatttgctacgccagaagaaattgttcgccatccagcaacggaatttgttgagcagcttttagggacgattcgccaaaatcaagatttgtggaggcaacaatatgattgagtattggaatgagaattggccgataatgcttgatgatgtccagcaacatgcaacgatggttctttcttcattagcaattgccttagtgattgcggttgtaataatcttattattcttacggcgtgaaaaatggcttaatagtttgatctatttcttttcactcttatattcaattccaagttttgccttttttgccttactcttaccgatttctggattaggaatgaagactgcaattattgttttaacgatctactctgaatatgttttattacgttcctttattacgggaatccgtggcgttgatccacaattaatcgaagttggtgtggggatggggatgacatctcgacaggtttttcgccaaattcaattgccgctagcattaccggcaatttttagtggaatccaagtggccctagcttcgacaatggcaatggcaactattgcggcaacgattaatgccggtggtctgggtcaattattgtttgaaggactgcaggggcaacaggtcgtgccgattttgtggggaacagtcttaacaatggctttgacattaatttgtgcaggaatcgttcaattgatctcgtggatattgttgcatcggtggaaaggagtattaaataactgagcaggaaattagtagtattcactgagaattcgtataatcaaaataggtaacgaaaacgaggaggatgctgaatggataaaaatgaattaaagaaattaacgccaatgcaatatgctgtgactcaaatgggggttacggaaaaaccatatagtggtaaatatgatcgatttgatgaaccgggtatttatgttgacgttgttagtggggaaccattattctcatcattagataaatacgatgcaggatgtggttggccagcatttactaaaccgattaagaagcgtgttcttacagaaaagcgcgatcaatcatttgggatggaacgaaccgaggtaagaagtaaggaagctgattcgcatctcgggcatgtctttactgatggtccaactgatcgcggaggattgcgctactgcattaattcagccgctttgcagtttatcccagttgataaattgcaagaaaaaggctatggagaatatctaagtttgtttgataaatagttaaaaatcaagggagtgggaaataacctcctcgacaaggcggttggctaagctaggatgatgattagcacggcatgggctgattatccttcgtacttagactcgagccttgtggttattttctacgttatctttctattgttcataaaagtagttgaggatgatgaattgtttaaaaaattcatcatccggtttttattttggactaggagttttttcccagcctccattctcgattttggttttaaattatttatccataattggcgattcatcccccacttctacaagtgggggatgaatcgccctcttaaagcacgttagtgctttttcttttgttctatgatatatttagtgtatatcaatatgagagtggtggtagtaattaaattggatcgtaatcaacgttcagtatacttgctgaattaccatttggtaatggtggttaagtatcgtagaagagtaattaacgatgaaatatctgaatatcttaaacatcgttttgtgattgtaggtcaatcctatggaattaatttacaaaaatggaatcatgatcaagatcatgtacatgttttgtttagagcaactcctcacacggagatggctaaattcttaaatgcttacaaatcatccagctctagaatagtcaaaaaacaattcccagaaatcaagcagtatctttggaaatccgccttttggacacaaagctattgtttaattagtactggtggagcactgttagaagttgtaaaacgatatattgaaagtcaagggagaaaataatggttctaaaagccgttaaaatgcgtatatatccaaactctgcacaacgagaccaactttggcaaaccttcggttgtgttcgttttgtgtggaatcaaatgcttaatatgcaaattgaacggcgtaaaaataatccagaggctaaatttgttaatgcctttggtatgaacaatctcttgaaacaacttaaagttgaatatccttggcttaagcaagcagaatcaactgctttgcaaagtgctaatcgcaatttagccgatgcttttcaacgcttttttaaaggtcaaaataagttccctcggtttaaatcaagaaaatattcgcaaagctacaattcaaagtacgttaatggcaacattagaattctagataggcatcatattaagttgccaaaacttggtgtggtgtattttagagctggacgtttgccgttaggcaaaattaagaacgtcactgttcgactaaatgttgctggtcaatattacattaccgttttagtggagagcgaaaatcaaactctccctaaaacaggcaaatatattggtggcgatttaggacttaagtcattactgaatctctctgacggctataaagaaccgttgaatcattttgaatctaaatacagcaagaagttgcaccattgggaaaactacgcagtcgacgttacttaattgctcaacaagctatcgcttgggatcatcacaataaggtgttaaagccatgccaactcgatgatttcaaaaactaccaaaaggcacggatcatggtagctaaatatcggcaaaagattgccaaccaacggttggatcagctacaaaaattcactactatattagttaaaaagtatgacatcattgtgttggaaagacttaatactaagggcatgatgaagaatcaccatttagctagggcgatcgctaacgctagttggtcaaaattagtagatatattgcaatataagtgtgaatggtatggaaaaaaactcattcagatcaatccatcctatactagtcaaatctgtgcaaattgtggtgaaagcaaccatcggttgggactaagtaaggctgaatggctaggaattagggaatgggactgcccaaattgtggcaaacatcttgaccgcgacattaatgcggctcaagtcattcttcaaaaaggtttggcgattcaataattagataatctaaaaaatacaggctcgggacgagccttggttaatagtcgtaacctctgcttgaaggctcgttaagaacttgtaaagtaagtatgcgatgttcccagaatctcccacttcaagcgttaaaccgcaggtttagctaagtgggagtagttcaattttcttctaacattgcatcataaagtgaagggcgaccacctaataaacgattaacataataggcgactaaagtaattaatgtcattggcaaaatttgttcaactgaaccaaccatttcagttactaataaaattgcgaccattgctttccaattcgttgaaagtgacatattagtgacatatttaataaaatcgtgactaccaccaagaatataagggttccataatccaacaggaataactaataatagtggaataatgttatgaaattcttttggaataaatgtgattttgctgtaccaccaagttaggtttagtgctgcaaattgaaaacggtatgccaagaaaccaatgacaacgccagcaacgattagtcatggataggatgcgactggtaatttagttgtgatcggaatatataggcaaggtttagtaccaaagaataaaaaaagtgataaatgcagaaacgattgaagaagttaaagcaggaatccaaattcgagaattaaaattatggatcatttcttctaataaaaacattgttcctgctaaaggtgcactaaaagccgcagataatccggccgcaacgccatactccatcaataaatatttatctttgtccgtaaagtgaaagaatttttcgttaaagcaggctccgatacaggcatcaatttggatacttggtccttcacgccctaagaaaagtcctggacagatagtaagcaaactagcaacgaatttttgccataatactggccaccaatgaatacgatgctttcctaacaaaacagcttttaattgggtaacgccagaacgaacaacatctgtttcataaggcttaacgatttttccgattaaccatgcaacgataaatgttcctaatatatatggaattaatagccaaggatgtttacccataaaaggataaataattgtcagtaaagtaagggtccggtcgataatccagcgaaaagccccgatcaccagaccagttactatcccaatagcaatactaacgccaaggtaacgagaaacaatggaggtgaatggttttcctaaaatgtcccgtgcccgtttgtgatataaagtattttcgcctttcataaatactgccttcaataaggtattttccctatattagcataaaaagagagtgaacaataacagtctacaagagataagtattgttcactctgcttttactatgaactttttaatttaatctgtgttggtgtttaccacccacaaataaacttataattgaagctactaaaattgcggaaaaacttacaacagcgattacgttacttaataatgacatcatggtaaacaccctttcttaataaatcttgttatcgctttcatcaactatattatagcattagttgaccaagattgatcaaaaaagaccttttattttactaattagggttgttatttcagcaactgcctactctttaaaaaagtcacgaataatttgtttataagctttaattgtagcaacgtaactcgaaatagttgtatattcatcagtttgatgagcaacgttccaatcgtcacatcctaaaattacaactggaaggtcgggacgatttaatgtaaatacacttgcgtcagttgcaccattgataatatcaagcttgatgtcatttggatagtttcgctgggcagcattgagggcaatttggacaaaatcgttattaggttctgtcgcaattggataaaaatcttgaataatttttagctctagttggaaaggagttgtgtggttaatatattcaagcgcatcatttaatcgatctgcaactttaacattattaaatgatgccgtagggcggatatttccttgcaaactagcactgtcggggatggtattaacttgagatccaccatcgataactgtaatactatgttggacttttccaaggtattgatcatctttggtgttatcaaaaaggtgtttttcttcttcgataaactttaacagcccttcaattgcattaataccattttgcgggtgagaactatgacaagattttccataactggtaacgcggtaattcatactccccgagtgagcaaaaataacattcccaccggttggttcgccgactactaatgcgtcaaggtcatcggcaactccttgcttttgtaaacgataagctccaggagtaccaagttcttctccggcggtagcaataaatctaacagttcctgatggcagttgcccagcttcttttaattcgattaatacaatagcctgggcagccagaccgctcttcatgtcagcagctccacgaccaaaaatataatcaccactaatttcaccgccaaagggatcatgttgccagcggtctggattaggtactgccacagtgtcttggtgtccagtgagcccaaggatttttttactttccccagtcccaatttccgcaatcaagtttgcacggcgatcaccaaattcatcaacttttgaatcgattccgtgatttgctaaaagtttttgtaagtagcgtgctacttcaacttcatttccattaacagaatggatttttattaaatcctgcagtactttgactttttcactgacttccataatgatccctcctatatgttagcgatcttggtggttaagcttcttggctaaaatatcgccaactacttgaatgattaaaacaaataaaagaacaagaatcgtggcgacaagggttacgtcgttgttaaaacggtcgtaaccgtatgaaatagcggtattacctaaaccaccagcaccaattgcaccagccattgcagtaaggctaactaaactgattagtgtaacggtggagacacggacaagttcagaacgagcttcgcggaggtaaacgtcaataatgatatcccagttagtagccccaatagcttgggcagcttcaattttaccgtggtcaacactttcaagcgcaacttgaacttgacgagcatagaaagcaaatacacctaatgaaagcggcactaatgcggcggttgttccaatctgtgttccaacaattaattgggtgaagggggcaatgaaagccaacaaaatgataaatggaattgcccggaaaacagatacgactttatcaacgatactaaaaacaattcgattttctaaaattccaccgggctcagtaaccacaagcgcaactccgaagattaatcctaaaattccaccgaaaatagcaggccagaaagtcatgtagatagtttggacgattgaagtaccccaaccattgtcaccaccccagccaagttgaattacatttggtataagattattcattccaaatcctccgatcatcaatctttgtgacagtaacatcattttcttttaagaaatcaatagcttgttgacacttatcagcatcgcccttgataactacaaacagggtaccgactggtgaaccagccaagacttcaatgtttccataaagcatacttgcttcaacttgcagcttcttatataactcgataatgattgatttagtcacgttatttgcatcgtagactaattgcagcaactcttcatcatcatcaaggtgaccaagatcaaatgctttaagggtatcgactgcggctaaggatcctcccacaaattgccgggttaagtcttgttgtggttggaggaaaactttctgtaaggtaccacgctcaatgatttgtccatattccatgacagcaatcttattcgctacccgtttaacagcgtccatttcatgggtaataaggacaatcgttaaatccaatttatcattgagccgtttaagaagatccaaaatctggtttgtattttggggatcgagggcagaagtagcttcgtcagagattaaaatttcaggatcgttagctaatgctcgggcaatggaaactcgttgttgttcaccaccggataattgaacagggtagaattcagctttatcctttaagccaactaagtctaaaagttcaagtgccttcttctcttttgcgtcattgtctaaatcagtatgtttaagagcgaaaagaacattttcaattactgaagtttcatttagtaaattgaagtgttgaaaaatcatgccaatttttcgccgcttttcttgtaattctttattgctaatttgctgttggtggtctttgaaaaagacagtaccattaactgttactgatccagcagagggaagttggaggaggttaatggttcgaactaatgttgatttaccagctccagaataaccaacaatcccataaatatcgcctttttctacttttaaagtaacatccttaacggcgtgaacaacctgttttcgttgcttaaaagttacgctaatgttatctaagtcaatgatcgggttcgccatattaatcctcctttatttattgaagttgaggttccaagcaggaatttctgcagttccgtatagtttcttaatttctcgttttgttttttcagtttggtaagcacgtacaacatctttgtaaatcttgttgttcttttcgctgtctttaacagcaatgatgttgacccattgttttgaatcctagttaactggttcaacgaaaattgcactcttgtaattaagaccagcagcttgtgcatagttagtattaacaactgcagcatcaacgttatctaacgaccgtgctgtttgatcagcggctaattctttaatcttaagatcgcgtgggttcttagaaattgaacttacggttgcgagctttgtgcccttctttaggtcaatcaaaccagcattctttaatgcgaataatgcccgtgattcgtttgaagcatcatttggtactgcgatcgttccaccattaggaatttcctttacactcttgtattgcttggagtataaccggattggagtaataaatgtatcgcctaaagaaacaagatcagttttatgggctttattccaagtttgtaagaataacttgtgttggaaggcgtttaagtcaacatcgccattttccaaagccttgtttggttggttgtaatcagtgaatcgtttgaattttaaagtaacattgtacttatctttagcggttttgcttactgaattccaaatttcatcatcttgttttgaaccagccataatcccgacagtaacagtccgttttgcttgttgttgcggacggataaaactaaagtatccggcaataacaacgataagtgcaactactgaccaaataatgatatttcttcttttctttctcttcatagtaaaaactccctttcaatcaattaaatattttcgttggttaattaaaacgttaacttgctagtaaataaaaaagcactcgtccctttattcaaaggacgagtgctcgcgttaccacctttatttgctgaatcttcacagacccagcctcagtaggttactctaataaaacaattagaattacctagcactaataacgtgtgctaacccgttatcgactaacaatcatcgataccattccaagcccatcttcaatagttacgcttgcttcttcacaccaccagaagctctcttgtaagcctcgctacttactctgcttttcgatatgttttaacgttcaattaattattatgtgttccattataatgattctctaatttttgtcaacgcattttttaatttaaattttgttttatttgggtcatcaatcgttttttattttgcctatctatagtaattaaaaaataattatgctaagattaaaaaataattaaaaagaaattgaaaggggtcatagtaatgacacgaaaagttggagttatcggaatgggtaatgtggggtcaacagttgcccactatattgtggcaatgggttttgcagatgacctagttctgatcgacaaaaacgaagcaaaggttaaggcagatgcacttgattttgcagatgcgatggctaatttgcctttccataccaatattactgttaatgattatagtgcgttgaaggatgcggatgtaattgtatccgcgttaggaaatatcaaacttcaagataatcctaatgctgatcgttttgcggaacttccatttacccgccaagaagtaaaagaggttgcacaaaagattaaggaaagtggctttaacggtaagattgtggctattactaacccggttgatgttattacctcgctctaccaaaaaataactggtcttccgaagaaccatgtattaggaacagggaccctgcttgactctgcacgaatgaagcgggcagtagctgaacggcttaatttagatccgcgttctgtagatggttataatcttggagagcatggtaattcacaatttacagcatggtccactgttcgcgttcttggccgtcctttaactgaattagcagataagcgtggattagacttagaagagcttgataaggaagctaagatgggtggctggactgtctttcaagggaaaaagtatactaattatggggttgcaacggcagctgttaagcttgtcaatgcaattttatccgattcattaactgaattaccggtatcgaacttccgtgaagaatacggagtctacttgtcttacccagcggttgttggtcgtgatggagttgtagagcaagcacaacttgacttgacagaagaagaactgcaaaagctgcaaacatcagccgatttcattaaggaaaaatatcaagaaagtttgcaagcaaaagattaaggaaaatttaaataaagaaaatagactagcataaaaaaattatgcatggtagaattgcttctatacttaacaaataaaagtggcgtcatcagataaatttggtggcaccacttttattctgtaaaaatatagaaaggaaatatatcatgacaaaagaagtaaagcgtataatctttgtagttcttttttgtgagtttttgatttgtctcggaatgagtcttatcttcccagttgaaccattcattaaaaatgaataccactttactgcctttgacatgggagtgatgtcttccctatttgcgtttgtgcaatttattgcttcacccattgttggtcggatttcagataaagttggacgaaagccaatgttagtatggggattgctaatatttgcgattgctgaatttgtttttgccttagcacagcatttatggttatttgacttatcgcgggcggtagatggattatcagcagctatgtttgtgccaacatcaatggcattagcggcagacattactagtgaaaaagaccgcgccaaagttattggttggctatcagcggcttttagtggaggattgattttaggaccgggccttggtggaatgttagcgcatgtaaattataaattcccattttgggttgctggtattctaggcttgattagtacggttgttgcttggcgctttttacctcatgatgaggatgaactatttaagagtgaaactaaaaatcctgaaaatgaactattgactggtggttggaatcagttgaaacaaattatgaccccaatactaatcacgctctttggaatgatctttgtagcttcatttgggttagcaggttttgaaagtatttatagtttgtatgtcaatgaagttcataattttgacttaaacgcaattgcgcttgttttaactctcaatgggattatttcgcttattttgcaagtctttttctttgatcggctagttcgctggctgggagaagttcgcctaatgcgatatagctttttccttagtttagttggaacgatcatggtaatttatgatcacaatcattggcatatcattattgcaaccttgtttgtttttgaagcattcgatatgttacgcccaacaattactacattattaactaagatgagcaagacaaaccaaggattattaaacggggtaaatatgtcattaacgagtgtgggaaatgttattgggcctcttattagtggctatttattagatgtcaattatcaatacccatattggttcgtatcgatattcctaattatttcctgggtaataacacttgttttaggacgggaaagaaaagcagctgctaacgattaaatatttaactttattaagaaaatagcgaggaattaggaaaaataaaatttttctaatttctcgctattgttgtatttatgcttaattttgttgtgcctgttgcaatgcatccttggttgcttctttaatcgcacgacttgttgcactggctccagtaataccatcaacgtctgcactattagctgcaataattttgccgggaagttcatctaaagcccatttgcccatttcagattcgtggtgtttgattacttgtaaatcttgaatcttgtcatcttggtaggttaataagacttttaattcaccaccataagcactaaagccatttccaatatattgggttctttctatttctctcattttattatccatttaaattacattattttgtcctgttacgcagagtgataatagcgggcaagtctgacatttaggatttcttgccgtacagacatacctaccccaaaaaatcatactatgatgagcatctaaccagtgttcagggggaatagttttcattaatttcttttcaattgcaagaacggatgctttgggctcaactattctgagacggcgggcaacccgactaacatgggtatcaactggaaaagcaggaatattaaagcattctgcgaggaccacatcagcaactttccttccgactccagataaggtcattaattctttgagggtgtggggaacctcccgttaaagtcagtaacaatttgttgagaagttttgactaagaatttagctttatttcgataaagccctaatcttttgatataaggctcaacttctgcgggttcaatccctgctaaatctgctggcaacggaaaacgagcgaatagtgctggcgttacttcattgacagattgatctgttgactgtgcactcaagattgtagccaaaagaaagtggtagtttgtgtcagcaatcaaagttgttcctgcttcgggaaatgtttgccgcatgaccttgattgagtaacgaatttcatctggtgataacatataaaatcactcttttcgaatatgattataactattttaacccgaatgattaaaatagcgaagggtaataatctcattttatactcattaaattattatttgtaaaattgagggttagcaatatgacatcaatttatgttaaagaaaaaatgtttaataaagatataattgtagaaatcgctttctttgattaatttaaataaacgattgacctagggaaggcgccttggtaaaatgtattaaagattttcttataattctaatcaaaatttaattattcagaaaaggaggataattatgagtttttggaaaacaattacacgtaaagaagacccgcgtgtttatgataataaagacggtcatttagttcgatctttgaaggtgcgggactttttagctttaggtgttggaacgattgtgtccacttccattttcactcttcctggtgaagtggccgcaatgcatactggaccttcagtagttatctcttttttaattgctgcgatcgtggccgggttagttgccttcgcctatgcagaaatggctgctgcaatgccgtttgctggttcagcctattcatggattaacgtcgtgtttggagaattttttggttgggtcgctggttgggcactattagctgaatactttattgctttggcctttgttggatctggtctctctgctaacttccgggcattatttgttccgcttggctggaagctgcctgcttcattatcaaatgcttttggtacagaaggcggagttgttgatattgtttcagttgttgtaattattttagtagccctcttaatttcacgcggggtatcacaagctgctcgtgttgaaaatcttcttgttattcttaaagtttttgcaattttactttttattgttgttggtttaaccgctataaaagcaagcaattttatgccatttattccacaataccatgaaacagctaatggtgcatttggtggttggcaaggtatatatgccggggtatcgatgattttcctttcctatatcggatttgactcaattgctgctaattcagcggaagcaatcaatccacaaaaaacgatgccacgtggaatccttggttccttagtaatcgcggttgttctttttatagcagttagtcttgtactgattggggtattaccatatcaacaatacgctaacagtgctgaaccagttgggcttgcattacgtgcagctcatcatagtggtgtagcaactgttgttcaaacaattgctgttctaggaatgtttaccgccttgattggaatgagtatggctagttcgcggttgatttactcatttggtcgtgatggaatgctgccaaaatggcttggaaaacttgataaacataatcgaccaaaccgtgcactttggacacttacaattggtgttgttttgatcggtgctttcttcccattcgcctttctttcccaattggtctcaactggtacgttgatcgcctttatgtttgtttcacttggtatttatgcattacgtcgtcgtgaaggaaaagatattccaaatccttcatttaagatgccattctatccagtattaccagctcttggttttcttgcttcattacttgtgtttatgggattagattaccaggcaaaactttacgctggtatctggtttgtctttggcttaattatttactttgcttatggaatgcgtcactcgtcaatggcaaagaaagaagatgaacaaaatgttaaaaacgaaactgaagcaggagaaaacaaatagagatgttttattagaagaaaaaaatgcatttgcaactgctgcccggattaagtactacgatattgtattagatcatggacggggggcaatggttactgatattgaaggaaatgattatatcgatttgcttgccagtgctagttcgactaatactggtcatgcgcatccgcgagtagtgcaagctattcaagaacaagcagctaaaatgattcagtatactccagcgtactttgctaattcacaagcagcgcggttggcacctcgattagcagaattagcgccgataagcgggccagttgaaatggtatggggtaattctggttcggatgctaatgacgcaattattaaatttgcgcgagcatatactggacgccaatatattatttcctttacgggggcctatcatggttcaacttacggttcaatgagcttgtcaggtgtttcattaaatatgacgcgaaaaatgggcccaatgctaccaggcgtagtaaaagtaccattccctagtccctgggaacgattaactaatgaaagtgacgaagcgtttgttgagcggatgtttcatcaatttatgctgccttttgaaacttatttgccagttgatgaagttgctgcaattcttattgaaccaattcaaggtgatgggggaattgttaagactcctcctgcttatatgcaaaaggtatacgaatttgctaaagctaatggaattctctttgccattgatgaagttaatcaagggatgggacggactggtaaatggtggtcgatccagcattttgggattgaaccagatttaatgtctgttggtaagtccttagcttcgggaatgccgcttagtgcaatgattggtcgtaaggagattctggaatcattaggtgcgccagccaatgtttacactacagctggtaacccaattacggctgcagcagcgaacgcgaccttagatgttattcaaaatgagcatcttttagaacgttcacaacgccttggcaaaaaagcagctgaattttttaagcttgaacagcaaaaatatccttttgtgggtgatgttcgaatgtatggacttgatggtggtattgatatcattgatccagttacgggaaaaggtgatacagaagcaacaaccaagctaatgtaccgcatctttgaattaggagcaattatcattagtttacgggggagtatacttcgtttccaaccaccattagttattacagaaaaagaattagatcaagcttttgcgatgattgatcaagcattcgcggaattagccgctggtaaattagcagctcccgcaaatgcagaagagttaggttggtaactcttgcaatttaagaccatcttcgggtatactttaagcgccatcttagctcagctaggtagagcacatccatggtaaggatgaggtcggcggttcgaacccgctagatggcttaaaatgaactaagaaaagagatttagaaaaacgattcgtttttctaaatctcttttcttctttataagaatatgaccttgctagtaatataattaggattgaaattacggctatgttaaaatcaaaattatgtagcattagcttaattgataaattggaggaaaagaaatggaatttattgcagtgttggcggggttattgcttgcaacccagatcgtagcacacttatgtcgtcgcgttgagattccagaagtgattggacaaatcctagttggaatcattgcaggacccgctgttttagattgggttcatctaaattcaatgatgaatgaatttcaggaaattggggttattatcttgatgttcatcgcaggattggaaagcgacctatccttactaagaaaatacttgaagcccgctgttgttgtggcgcttttgggggtaattgttcccattgtaattatgggaccagtaagttatatgtttggctttactaagcttgaatcactttttatcggggttatttttgcgacaacatctgttagtatttcagttgcagtattgcgtgaatttaatcgcctagatagccgagagggggcaacagtgcttggagcagcggttgccgatgatattattggtgttatcttgttaagtgtgatgattagtgtaatcaatggaagcagcaatagtggccacggcaatggtcagcctttaggaattgtcctcttgatgcagttagtgttctttggtggaacttacctattaattcgttggttagcaccttacctgattcatatgagtgatcgcctattaacagttgcttcaacgtcggtaatggcgatgattatctgtttaggcatggccgcaattgctgattatgttggcttgagtggggctgttggctccttcttcgccggaattgctgtggctaacaccaagcataaagaagttgttgaccggagttttattccaattggatatgcaatgtttattccgctattctttgtcagtgtaggcttgaacatgcgctttgataatattggtgaatcgtttgtctttgttattgtaatgacaatccttgcatgcttaacaaaactgcttggatgtggagcgggtgctaagctatctggctttagcatgcccagttcttatattgtcggtagtgggatggttgcccgtggtgaaatgggattaattacagcccagattggttatgaagcacatcttctttcgccaatgtattattcagatgtaattaccgtgattattatcgcaactgtattagcgccatttattttaaagaatgcattgaaacgatcagccaacgaacttgagtaaagggggcttttgatggaaaatcatgaacgagaaacggagcaagcgcgggttgataatgttgaaaaacaaattgaccaacagatagctgctaccactaaagctgttgaagatgctcatcgtgaaacacgggcagttgaacgtaattatagtgaaaatgcatctattaatcgttatgaagttgatgatattgctgaatctcggtcaatgattgaacagcagcgacaattggtttcacgagcagcggaaagtgaatcaattctaaagcaccagttaagaactttgaaaaacttaaaagggtcaccgtattttggccggattgatattcaagatcctggtgaagataagagtgaaacgctatacattggtacttcttctttaatgaatgaagataaaacagactttttaatttatgactggcgggcaccgatttctggggtttactataatggtacccttgggaaagtcaattatgaaacgccagctgggatgcaaaccacagaattaaaaaagaaacgccaattcactattaaggatggcaagatcactaacatgtttgataccaatgaaacggttggtgatgaagttttgcaagcagctcttggaaagcaaaatgaccagtatatgcataatattgtggcaacaattcaaaaagagcaaaatgatattatccgtgatacgcgtagtgatcttttgctagtacaaggagtggctggttcaggaaagacttcagcgatccttcagcgaattgcatacttgctttatcatagtcgaacagaattgaatgcggatcagattgtcctctttagtcccaataatttatttagccactacatttctgaagttttgccaagtcttggtgaaagaaatatgcggcaagtaacattagaagggtttatccggcggcgttttgaaggcttgcaagtagaaacattatttgatcgctatgaagaacggcaaaaacctgaaaatgcttctcatgttgttgctgactttattgaaagtgaatcttttatgacgtcaattgcacattatgtcgagaaaatgacaattgaggatttgcagtttgctgatattcgttttaatggtcaagttttcttttcagctgaccacgtcaaagatctttataaagaattaccattgacgatggctcctgctgataagttagttcaattgaaaaataagttaattcgtgaattacagcggcgagttaaagatgaagctaaaaaagattgggtagctaaagaactggattcacttgatttacaacaattgcacaatctttgtggtaagaagtcaattgatgactttaaggatgaagatgagcaatatgtttacctttcgcggcgtttagctaaacgacgcttacgtgtgattgcagatgcgatctataataattactttctcgatttttataatcaatataataagtttttgcatcaagttgaggtacctaagacaattagtcagcgggaatgggcaacaatgattcttgcttttcaagatgagattgaataccatcggctggaattaatgcatgcggcacctttgatgtatctgcgtgatttgatttccggtacaggacaaaatcgttcttttcaatatgtatttattgatgagatgcaagattattcaacagcgatgttaatctacttaaaacacgcctttccccaagctaagtttacggtcctcggtgatagtgaacaggctctttttaagccattgcagttaccggaagagttattaaacaaacttagtgggatattaaaggctaagcggcctaatttaattgctttacggcgaagttatcgttccacgacggagattactaattttgcgaaggccttgttgccggatggagataagataatttctttcactcgccatggaaagaaaccacgcttgttagttcgttattctgataaagagagtcagcaaagcttgttagatgagacacttaaactagctaacgaacatgaaactgtagcgatcttaaccaagaatcaagagcaagccgctgttatttatcaattacttcgccggcaaaaggttgaaaatattcatctcttagataaggatgcaagtgaattgccaaaggggatcttaattctcccaatttacttagcaaaaggactcgaattcgatgctgtccttgctgcggatgtctctgctaaaaacctagctaatactgatgaagtcggtatgatctatacaatggcatcacgggcaatgcatgaactggtccttttaagcaacggttcagttagcgacgcaattaacgagaaagctgggcgtcttttaacgattgaatatcaattgccaaataaaaattaaatttttctattgtctaaaaacgctttcaagaagtgtcgacttatgataatctaatggagtagatatagaaaaaggagatgcttcgccatggttaaagacgaatacacacttgtactagtaaagcctgatggggtaaagactcgtcatattggagatattattacccgtattgaacggaaagggtataatattgaagctcttaagatgattgacccatcagaaaaaaagcttcgtcaacattattttgataaagttgacaaaccattcttccctgaattgttagaatacatgacagaaggaccaattgtcggaattgttgtttctggtactaatgtaatccaagcaattcataacatggcaggagctactaaccctggtgaagctgaatggggaacaattcgtggtgactatggtcgtgaatggcctgatggtaacttgcgaaatatcattcatacgtctgataacgttaacagtgccactcgtgaaattggtatttggttcccagaatttgatattaaagataaacagtagaaaataaaaagactgagagaaaatttttcctctcagtctttttacttttcacttgccctttgttggcgtttaatttttcgttgtactgccaaggtattgcgttcccagaagactccgtcagtgtagccttggatgctaggatcatcttttatttgattaagtcggtactgtccccatgcacaatatagaagactttgctcgattccaagataacggcggttaagtttagcagcagtcactaaactcgaaccggaaccagcaaaaggatcaaaaatgaagtcattaggattagaactggcaaggataatttttgccagcaatttctcaggcttttgcgtagggtgaccagtattttctggcattgaccaatacggaattgaaatgtcatcccaaaaattagacggcattgtatcccgaaagttaccatttttagtagcttgccagtctttagctaccccatcttgacgataaggagctaccacctgtcgtcgttgcttaacttggtcgacgttaaaggtgtaatcactcgggttcgcggttaagaaccaaatatcttccatcccatttttccaatttttcagtgaaccccggcccttttctcgttgccaagtaatccgattttgaattgtaaaatttttttccaggatcggtgctaaggccatgctggttgcccaatcagaaaagacatagatactagcattttcttttaataatggttttaagaggtcaatccacttttgcgtgtaagcttgatattggcttgtggacatttttttaaagcttaaaccatcatactgtttattaaggttgtaaggagggtcaataagggcgagatcaacctggtgtggtgataatttagtcattaccttgaaggaatccccgttgataatcttatcggatattgtctggagattatcagtaggctgaataatttggttgaggagctcaggtgaagcttcctccagcgtgaaatcgattgttttatttctttttgagcgcatatagaccactcctgttcgacgtttaatattattatacttgtcatattcaggattgtcttgcctttttagtaggagttggattaaaattaattatattaagtagcgcgagccttagcgaggggcggtcggtgaaaaggtccccaaagtgcgaaatggtcacaacaagatacacaatgagcggcaataatgattgcaatttaggtggcaccgcgcgaaaagcgtcctatttagtttatacgactaagtagggcgttttgtaatttaggaggaatttaaaatggcagaagaaaaacacgttattttaactggtgatcgaccaactggtaagttgcatattggacactatgtaggttcgttaaagaatcgggttgaattacaaaatacaggtaaatatgatacatttatcatgattgctgaccaacaagcattgaccgataatgcccgggatccggaaaaaatccgccgtaatctccatgaagttgctctggattatttggcggttggaattgatccaaagaaatcaacaattttggttcaatcacaaattccagcattgagtgaattaacgatgcactaccttaacttagtaactgttgcacgtttacgccgaaacccaactgttaagactgagattaagcaaaagaagtttggtgaaagtgtgccagctggattctttacttacccggtaagccaagcagcagatattacagcatttaaggctgatacagtgccagttggtgatgaccaagaaccaatgcttgaacaaactcgtgaaattgtgcggacattcaaccgtatttaccaacaagatattttagttgagcctgaaggggtattcccaccaaagggtcaaggacggattccagggctagatggtaatgcaaagatgagtaagtcgcttggcaatgcaatttatctttctgatgatgctgatacagtgcaaaagaaagtaatgtcgatgtatactgatccaacacatatcaaggttagtgatcctggtcacgttgaaggcaatactgtctttacttaccttgacatctttgatccagacaaagagcaagttgctaaattgaaggagcaataccaagctggtggccttggggatgttaagattaaacgctacttaaatgaagttcttgaagctgaactttcaccaattcgcaagcggcgtgaagagtatgcagctaatattgattatgttgatcaagttcttaaagaaggctcagcacgggcaaatgaggttgcaaaccagacgcttaaagaagttcgtgatgcaatcgggattaactactttggctaaaaatataaactaaaaaagcgaggctgctaggaaaataagtttttacctgagccccgttttttttcgtgtctcccatagcagaacatggtaacataaaagagatgtatttatacgaaaaataattaattaaagcggaggtgaaaatggtggaaaacctcgcgattgtagacctcggctcaaactcggcccgaatggcaataacagaaattgctccagatggacgatttcgtgaaattcgacgtgtaaaagaaaatacacgtttatctgagggaatgggacgagaaaaaatgttacaagagagtgcaattgaacgcacaattgcggctctaaaacgatttaaaaaaatctaccaagagattcccaatattaaagttcgtgcgatcacaactgctgcagttcggcaagcacgaaatcgtcaagagtttttgaatcgtgttcaacaagaagtcggtattcatctacaagttttatctggtaaaaaagaagcctattatgattatctaggcgttgttcggacattgcgacttaaccactgtttgattctagatgttggtggagcaagttgtgaattgatattggtgcaacagcgaaaagcacgtaatttgatttctattccggtgggagctgttaatttatcagaacaataccacttaaatggctatgttcgttcggctgacctttttcgtgcgcaggtagcgataaatgaacgattgaccaaaattccttggttacgatatacaacgcgtgttccgattgttttattaggtggtgctaaccggactttggcgcgtatgactcaatcctatcatcaccatcaccgccgaaacggttcgattcatgggtatcaactctcctcacgagtagtatttgcgacttaccgtgaattattaaatcggaacttggcccagcgtaaacggctgactggtctagaaccggaacgagcagatattattattggtggaatgctgcctcttgtaacccttttgcaacgcaacagtgatggccgggttattttttcagagagtggtgtccgcgaaggaatcatcactgaatatgtaaatcaaaggaagcgacaccatgactgattggcaacacggtttttataagttatctgccgatgatcgacgtcaacaattagcaaaagctcgtcacctatcccctatggaagagcaagtattagcaaatacaagttcagatttaggggatgagttagtcgaaaattatattactgattattctttacctgaaggagtagccttaaatataaccgtaaataatcgtccgtatgttgtaccaatggtgattgaagaaccatcagtcatagccgctgctagcaatggtgcacaccgggtaagtaggtcgggaggatttactgctcctcggcaagaccgacaattagtggggcaagttgtgttagatgatgtgaccgataaagcagcagttaaagcatggttattagaacaccaagatgagattttaacaattgctaaccaggctcatccctcaatgcaggcacgaggtgggggtgcgaagtcgatgaaagttcgcactcctgggaactttattagcattgacctggggattgatgtttgtcaggcaatgggcgctaatagtgtcaatacgatggcagaagcggttggaaaatggttaacagaccagggcttccatgttattaccgcaattttaagcaatcttgcaacgcagagtctgcaagccgctacttgtaaagttgattttcgatacttagcaactccggagatggatggtaaagaggttgctcaacgaattgctcgtcttagtgatcttgcacaagttgatccttatcgagcagctacccataataaaggaataatgaacgggatcgatgcggtcatgatcgccagtggaaatgactggcgggcaattgaaagcggggcccatgcctatgctgctcgtgatgggcaatatcgaggattaagtacttgggaaattcaggacgactacttggtaggaaaaattgttcttcctttaccagttggtgtaattggtggttcaattggattaaataagatgacaaagataaactatcatattagtcaaattaaaagcgccgaagagttagcagcagtaacagcaagtgtcggattagcacaaaatttggctgctttgcgggcattgacaactactgggattcaagctggtcatatgaaactccaatatcgctcattagcggcaagtgtcggagctacgccagcagaagtaccgttagtggtagctcaattaaagcagcaatcacatgttgaccaagcacttgctaaagaaatattatcaacgatcagaaaggaccaagttaatgactgaagagagaattacactaaataaagaaaatcaagcactccttgatcaggttaacagtctatatcctgaaggtagtgtctttgttcagtttcatggtgacaagtcaggatacgttcgccatgaccaagcaactcaacaaactattcctggtgccttggttattattgtgactgacttaactgccccaaattacactgcttcacatgagttattgcaccttttgatgttgctaaaagggtttccacaaatctttttccaactatctcttggtgataaggaactcgatgaacagatgatgattatgtcaacggatttgtataatattgccatgcatcgagtagtggttgcagaacaacgtaagcatggttttattaccgatgagattgaagagcagtatctaaaggggattgaacacacattaactccggaaaaagaggaagatgatgaacggacgttacggttgttaacccttttggatgccttggtcttttatggtgatcacctctcaaagtatgaaaaaactttagcagaaaagtacccgcttgcactgaccgcggcaaaaaagatgtatgctgagattacaaagaagccaattaagtcaccattcgatatgcgccggtcaattgttaagatttattctttgtttgatcaacaaatgcaggaatggggcttaccagccttacataataatgaatatacaactctctcaccggtattaagtgcccggcaattacgtttagagatgcgtcaagtttttgaaatctatcactctgatatgaaagaacgggggacagataagcgcgcctatgttggtcttcggcggagtgatggtcaaaattcgtttactcttccggcaccggctcaaaatgcgccagaagaatttaagaagatatatgatcaaccagtgaaggaatttcttgaacagaatagcattccatacattgtaaggaagtgagttagatggatgcgacgattcaaaaaacatttgacgacgcaaaaaatattgtctttctaacgggagctggtatctcaactgcttctggtattcctgattttaggtcagcaaacggtttatatacgcaaaatcggaatgccgaatattatttaagtcaccgttattttgctagtgatccagaaggcttttacgaattttgcaagcagaatttatattttccagatgcaaaacctaacgtaattcatcaaaaacaggcagcgttgacgcaacaggatcgcgcgacagttataacgcaaaatattgataacttatatgaagaagctggaacaaaacacttaattgattttcatgggaacctcttccacgtttattgtgaaaagtgtcatgaaacagttccggtgagtgaatatttgaatagtcgcttgcatcaaaaggataatggtcccttgcgtccggatattgtgttatatgatgaaggaattaagcaagaggatattgtcaattctgtcaaggcaatgcaacaagctgatttagttgtgattgtgggtacttcgatgaaagtatacccatttgcgggcttgctagattaccgcaatccaaacgcaaaggtgattgctgttaatcagcagttattgcaatttccttttaactttcaaatggttcaagatgacgcaacaaaattctttgacgaattaaaagtataaaaaagaagctgcagttgtctgaggacaatttccagcttctttttgctccagtagttattcaaagaaaacgaccttcccatcaactttgaatgggagtgctactaaatgagaacccttctttttagtagtagccttttcttgataaaaaatgtgacgaatacctttgttctttagtagcatttctgatcgctcctttcatattgttcacttgtaaaataacatgttttgaacgttttccctagagaaataatgaagtatgagaaacgatttcattttaatgggtgaaaatgatgcataatccgttcgttttttactacaaaaatgaataaaagcgataaaaacaacgattcaagtccttgaaaaatgaatatagatttattttgtagtgtataagaatttgctaagtaatttgatgaggattttggggtacgaaagagaggattaaagatgaaaataacgatggggatgacaacttggacagagcatccagtactcattcatgatgaacaacgcccagtaaggcttgatgagtatgctcaacattttccagtcgttgaggtggatacttttttctatgctttacctcagatatcaacgattcaaaactggcttgctactgttcctccaacttttcagtttatcgttaaagctaaccagaaaatgacactgcatcagcgaaaccaggaacgtggcgaattagaacaggtctttcaacaatatcgccggataatctcccccttggtagctgctggtcaattaaagacgatattatttcagtttcctccatattttgatgcaactgtgcgtgatttttcttacttacgattaattcgggaatggttaggaaacttgccaattgcagtcgaatttcgtaatcaaacttggtataagaaagaaattttaccgtcagtcttagacttctgtcgtgaactcaatttcacattagtggccgctgatgaaccccataatacgccaacgtcagtaccatttgtgcttgcaacaactaatcccgacttagccatgctgcgccttcatggtcgtaatcgcaaaggatgggaaaatcaaggaaaagaatggcggaaaacgcggactttatatcgatattcgacggaagaactccaattctttaaaaaacaaattgagtccttgcagccgcaacctaaagaactctgtgttatcttcaacaacaactcagctaaagatgcagcacccaatgcattgagtcttcaaaaaatgatgaatattgaattcgagggcctggcacctaaatcgccagaacagcttgatctgttttaggatggagcaagccctaataaaatgctatactaaatgttaaatcttaattagtaatatcttagaaagaggggcttcatatggctgaacaaaaaccaacttattacattacaacaccaatttactatccatctggtaaactccatattggtaattcgtacacaacaattgcatgtgatgcggaagcacgttttaagcgtttgatgggttatgacgtattctacttaacaggaaccgatgaacatggccttaagattgaacaaaaggctgaaaagctcggcatgaagccacaagaatacgttgatcaaatggctgcccaaattaaagagctatggaaaaaacttgaaattacaaatgacaagtttattcggacaactgacgactaccatgaaaaagctgtccaaaaggttttccaacaattgcttgaccaaggggatatttacaagggtaagtatactggttggtactcagttgatgatgaagaatacttcacagaaagtcagttagcagaagtttaccgtgatgaagacggtaatgtgatcggtggaaaagcgccatcaggtcatgaagttcaattagttgaggaagaatcatacttctttaagatgagtaagtatgctgactggttaatgaactactataaggaacatcctgattttatcgaaccgcaatcacggatgaatgaaatgattaataacttcttaaagccagggctagaagatcttgcagttacgcggacatcatttgcctggggggttaaggttcctaatgaccctaaacacgtggtatacgtatggattgatgcattatcaaactatattactgcgctaggatatggcagtgatgatgatagcctcttcaagaagtactggcctgctgatgttcacatggtaggaaaggaaattgttcgtttccacacgatttactggccaattatgcttcatgcgcttggcttaccattgccaaaacacgttattggtcatggatggttaacaatgcgtgatgggaagatgtcgaagtcaaagggaaacgttatctatcctgaaacccttgttgatcgttacggccttgatgctacacgttactacctattacgggcaatgtcatttggtaatgatggcgtctttagtccagaagactttgttgataaggtaaactatgacctcgctaacgatctaggaaacttgctcaatcggactgttgcgatgattaataagtatcaaaacggcaaattgcttggtactaatgatgcaactactgattttgatgctgatttagaacaaactgctagtgatgtaatcgctgagtataaagaactgatggacaaaacacgatttgctgaagcattggcagctgtttggcagttggttagtcgtgctaacaagtacattgatgaaactgaaccatgggtattagcaaaagatgatagtaagaaggatgtattatcagatgtgatgacccatctagcaaagagtttgcggattattgcagccctaattcaaccaattatgccgcatgcaccaaaacaaattgttgaacaacttggaattgaagggactgacttatcattaaccgatcttcaatttaatgatttcccagcagaagctcaggttgtcgccaaaggaactccgatcttcccacgattggatgtgaaggccgaggttgaatttattaagagcaagatgacagtaaacgaaaagaagaagggaagaaaggcaatggctgaagcaaaagaaaaagcccaggaagcagcacaagaagaaaaagcagatggcaaaaagccaattcggattgatgtctttgataaagttgaattgaaagtagctcaaatcactgctgccgaccatgtagaaggtgctgataagcttctgaaattccacatggatgatggaacagaagaaggtcggcaaatcctttctggaattgctaaatggtatccagatccttctgttttagtaggtaagaaagttttgattgttgctaacttgaaaccacggaaaatgcggggcgaattaagccaaggaatgcttttgtctgctgaaaaagacggtaatgttcaagtagtaactgttcctgacaatttagtacctggaatgggcgttgaataaagtgagtaatcatcaacaccagcaattggtttatgattcccatacccacctaaatgacgatgtgttttatgatgatgtgcctgcctttattaaccgtgctgctcattatggcgtgacggagatgaacattgttggctcgaaccagctattgaatactcgtgctttaaagttgggacatcagtacgataacctgcatccaattatcggttggcatccagaagatattgctaattggaatagtgaaaccaagaaagaattacgccaacaattagcagatcccttagtcgtgggaattggagagattggcttagattattataatgacgagcattctcctcaccagcaacaacaagaaatttttgctgaacagcttgagtgggcgcgagaacttaaattaccggtctcaattcactgccgggatgcactagctgatgcatatgaaattttgcggaatgcccacgtcgatgaatttggcggggttatgcatagttttaatgggacttcagaatgggcagagaaatttatggatctcgggatgatgatttcatttagtggtgtcgtaagctttaaaaatgcgacagaagtccatgaagcagcattagttgttcccctggaaaagatgatggttgaaacggatgctccttacctaactccgctcccataccgaggaaagcaaaacgaacccggttttactaaatttacggtggatgcaattgcagatttaaagcaggttgatgctggcaaagtggcatataaaacatttacgaacgctcgccacttatttttggaaaatgaagaaagaggcctatgattagaataaaagaagttatagttgttgaaggtaaagatgatactaagcaaattttaaaagcggttgatgccgatacttacgaaacaaatggatctgcaatttcaacggctgacttggcaaagttgaaaaagttacaagcaagccgaggcctaattgtttttactgatccggactttaacggggagcggattagaaaaataatcagtgaagccattcctggcgttaagcatgcttttattaaacgaaaagatggtgtgccaactgaggctcacggtagcttaggggttgagcatgcaacgccagcaattataaaatcagctttggagcacctttatactcaaacaacgacacctcagcaagtttttaagcgagaagatttgcaaaaatggggattaacaggtcaagcagattcacgaaaacggcgtgaaaagttagggcaattactcggaatcggttatggaaatgggaaacaattgattcaccgtttaaacatgtttcaagttgaccgggcaacatttgaaaaagcgattaagcaaataaatcaggaggcagatcatgagtaattcaccagaaattggtagtcgaacacgtacccgcgcgataatggaaaagtacgggatccgaacaaaaaagagtttcggccagaatttccttactgatttgaacgtcttaaaaaatatcgttgaggcagcagatattacagctaatgacaatgtaattgaaattggtcccggaattggtgctttaacggagcaattagcacaagcggcgggagaagttttagccttagaaattgatcaagatttaattccggtattaaaagaagtattatcaccatatgataatgtaaaagtgattaatcaagatgtccttcaagctaatttaccagagttaatcaaaaaggaatttaaggatcctagtcgaccaattaaggtggttgctaatctcccatattacattacgagtcccattctaatgaatttgctggctagtcctgttgagtgggcgacgatttgtgtgatgatgcaaaaggaagttgctcaacgactcactgctaaaccaggaactaaacaatatggtgcgttgacattagcgattgaataccaaatgcaagctaaaattgcttttgatgtttcacggaaagtattcgtgccgtcgcctaatgttgattcagcaattgtggtattaacgccacggacaaatccgcttccggttcagccttttgataagcaaaaattatttggctttatccggggatgctttgctcatcgtcgcaagagtctttggaataacttgcaaagtgtaattggtaaggatccagcggtaaaagagaaaatgactgctgtcttagctcagctggatatttcgccacaaatccggccagaaaaattaaccctcaaacaatttattgaacttgcgaatgctcttcaccggcaaaatctcttgtaaaagatggttgaccgttataaaatattatggtacaattttgatttttgtgtaaaaaaagagtatgctagtctacagtgaggtgaaggagtcgtgcctaatagcattgtagaaattaagaagaagctagatgaacggattggcgagcatgttttagtaaaagcgcaagctggacgtaaacgtattaccacccatcacggtattttaagtaagacttatcctgcagtatttgttattcatttaaatgatgaacaaggaacattggatcgagtttcctatagttatactgatttgttaacacgaaatatttcaattgccttcgatgaagcagaataaactgataatttaaaattcatatttataaaataataggagtgagtaaaaatacctttcaacaggaaggcagtttttattcactccttttgctttaggaatagttaggaaacagtagttgcaaggattatagttccgttagtataatttaactaactaaattattacaaataaggagggttgccggatgatagttacagaaaaagcaccagcaaaattgaatttgagtttagatacgccgatgcgatattttgatggttctcctcaatgggatatggtaatggtctcggcagacctggctgattatgtaactgttgagacacaccggcgccctgcaacaattaaagtctatacaaatagtggctttttacccaatgaccaacgtaatttagcataccaagcagctcatattttacgtagtcgttttcattgtaaagatggcgttacaattcggattaagaagcaaattccagtcgcggccggattgggcggtggctcttcagatgcagcggcagttttacgcgcattaaatagtatttggcggttgggcttgagtttatcagaactagcaaagatcgcattaacaattgattctgacgtcccgtattgtatatataacaaattagcccacgttactggccatggtgaaaaaatcgaattgttaccaccgcaacctcattattgggctgtaattgcaaaacagaagatcagtgtttctacgccgcaaatcttacgacaaattaattatgagaagcttcaacatcttaataatgaagcattactgacaaatttaaagaaagaagattggcaagaagcaacaaaatatatgggaaatgttttagagcccttaacgatgaaattttatccagagattggtcgtctaaagaataagatgaaagaattgggggccgatgttgcccagatgagtgggacgggaccaaccgtcttcgcaatctgccatacagaatcgcgagcaaaacggattcaaaatagtatccggggattttgtcgcgacgttcatgttgtaactttgctttgattatatttaaggacaagaggaatgaggctgagagaaaacttttgttttctcccagcctcaactgcttttatgaacaatagtaagataacgtgaaactagcttcatgtcgccacaagactcgaggctaagtacgaacgctaatcagcccgtgccgtgctaatcatcgttctagcttagcccaccgccttgtcgaggaggttattttccactctcctcttgtcctttttatttttatagttgcaatctagcataaagttcgatattatattcattgttctaaatagtaatgattacgattaaagaagagggaaagaatgaaaaaatatattatcagtattagtagtattgttgctttgttggttataattcttgggttatcctttgttccgtggaaatcgatggggaaaaatcaaaagccaattagagtggtaactgggatgaatttctatggtgaagtagcgcagaaagtagctggcgatcatggccaagtgatttcgtttattgataatgcttcggttgatcctcatgattatcaacccaatactaagcaagcccagcaagttgctaaagccaatgtagtaattgaaaatggtcttggttacgatagctgggtaaacaaactcgttaaatcaagcagtaaccataacaagattaaagtaattaatgtagcatctttaaccggcaagaaagatggcgacaatgagcatatttggtatgcacctgagacggtcgaaaagttagcaaatgatcttgcaactcaatatggtaaaattgatccgcaacatgctaaggattaccaaagaaatgcacgcaaatatttagcttctcttcaaccgcttaatgaagaaattgcgaaagtaaagcgccaggtaaatcctaataataatcgagttgcagtcagtgaaccagtttttgattatgccttagagaatgttggttatcaaattatggacaagcattttgaaaaagcagttgaagatgggaatgatccatcaccaaaagatattgaagaaattcaacaagcaatcattaatcaccaaattgccttctttgttgataattcgcagacaagtgataaagttgttgataatttagttaaacttgcccatgaacataatgttccagtattaaaggtaacggaaacaaagccgaatgggtatgactatatgcagtggatgctcaagcaataccaagcattgtctcgcattcaacaaaaggagaattaagaagataatggcagttgtatcagttgatgatttaacgatcgcttatggaaatcatactgtaatcgatcatttaagcttctccattaatgaaggggattttcttgtcgtggttggtgaaaatggggtcggaaaaacgactcttgttcgctcaatgcttggttttttaaaaccgaaaagcgggacaataactattccgcaaagtacacgacttggctacgttcctcagtttcgtaatattgacgaggaatacccgctatctattcgcgattttgttgctttaaatactaaaccacgccttttgccatggctgactaaaagcgagcgaaaccgtgttgaacggatgattcgtgaaaataacctaacaaagattgctgagcggccccttggtttagcatcagggggtgagaagcaacgagcatatcttgctcaagctttattacccaatccaaatctccttattctggacgaatcgacggcaagtctggacaatgaaatgaagtatgaattgctagacctggtaactcgttttcaacaaaatggtttgagtgtaatgtttattactcatgattgggatctagcaaaacaatatggaactcgtttcttgtatttatctcccggttcttattccactgggccaattaatgagttacccagtccggtaaagggggataaaaaataatgttaactttaagttttatgcgtcatgcatttgtcgctagtacatttattgcgattatttgtggaattattggagtttttgtcgttgcacgaaatttatcattcttaacgcataccttgtctgaaattgggtttgctggtggtgcttttgccgtttttgctggatggccagcactaaatgggatgattctgtttacaatgttaagttcagttattgttggacaaatgagtataaaagaatcacgacgagaagcggttattagtgccgtttcagcgctgttcattggcttaggaattcttttcttatctttgagcagtcagtcagctagctcagcaacaagtattttgtttggtagcgtggttggaattagtttgaatgaggtctggcagcttgtctacctttccattcttgttttaatcattttgctattgatgtatcgtcgccttaagtttgattcctttgattcaattggggcacaggtcagtggaataaatcaaacagtgatttctgttatttttcttttactacttgctttaagcgttagtgtcgctgctcagattgtcggttctttgctaatttttattctcctaacgttaccagctgctagtgctaaatactttacgcatggtgtcgcacggatgattattttagcgattttattttcactgttaggaacatggcttggtctttttctcggttatttgacagattggccggttagtttctttatcgcagtgattgaagttatcatctataccacagccttgatttatagtaaatttatcgaatcgaattagactgtggcttaagtagttaagcaggtaaacaacatagtacaacaatggtcttcaacgcccggcaaagtgttggagactattattatttgcggggctttcagatgctagcttcgtggtgacaaaacgcccccctatctcggactctttttcttcagtaaatactaaaatttttgccgaaaatccgaacattttatgttaaaatcaatgttaattaatcctttttgaaaggcagagaaagaacatgaaaattagacggagtaaccgattggtggatatgacacgttacttgcttgaacatccgcgatcattagtatcgttgaaattttttggtgagcgatatgactcagctaagtcatcaatcagtgaagatttaggaattgttaaacataccttccaaacgtggggacagggacgattagaaacaattcctggtgcaagcggtggcgcgatattaacgccattttattctaaggaaaatgctcaggcggccattgataacttggttgaccgggttaatgatgactcgcgtttgctaccgggaggttatgtttacttatcagatttaatcggccaaccggaagtcttgcggcagattggtaagttaatcgctactcaatacgttgatactgatgttgatgttattatgacagttgagactaaaggaattccgattgctcaaagcgttgcgatgtatatgaataaaccatttgttattgttcgtaatagttcacacattactgaaggacctactgtaagtgttaattatgtttctgggtccgtccaacggataaagaagatggaattgtcccgtcgtacattatcagctggggcgaatgtcttggttgttgacgactttatgaagggcggcggcacgattaacggaatgaaatctttgattaaagaatttgatgctaacttggttgggattactgtttttgcagaaggtcgtccggtaaatgggcaacggttagtcgataactgtacttcattaatcaaagtggaaactaaagatggtacggagaagaagattgcagcacaagcaggaagcttcatggaaaacgtgtttgataagaaagtagagaattaggaaatgacaaaacgtaatgcaattattttagctgctggtaaaggtacacggatgcgctcaaagctatacaaagttttacaccaagtttgtggtaagacaatggttgagcatgttttaactcaattggaaaaagccaaaatcgataatattattacaattgttggttttggggcggaaacagttaaacaacgattaggacaccgtactaaatatgcgctgcaggaacaacaactcggaactggtcatgccgtaatgcaaacaaaaaaccttcttgcaaatgaagatggtgaaactattattgtcagtggtgatactcctttatttacggctgagacttttgaaaagctttttgaatatcatgaacaacggcatgcggcggctactattttgacttctattgctcctgatccaactggttatggtcgaattgttcgaaatgatgttggaatcgttgaacgaattgtggaacaaaaagatgccactattcaagagcaggcaattaaggaaattaatactggagtttactgctttgataacaaaaaactatttgctgcccttagtaagatcacgaatgataatgctcagggtgagtattatttaactgatgttattggtattttaaagcaagaaaatgagatcgtaacagcctacaagatggataactttgacgaatcgatgggggtaaatgaccgagttgcccttgcacgtgccaacaaggtaatgcgtaaccggattaatactcattggatgcgtgaaggggtttcgatgattgatcctgatacaacttatattgatgctgatgttaagattggtcgtgatacagttattgaaggtggcgttgtgatcaaggggcatacagaaattggtaacgattgttatatcggtgctggttcacggatcattgattccaagattcacgatggggttaaaattatttcttctacccttcaagaagcagaaatgcacaatggcagtgatatcggtcctaatagtcacctgcgtccagaagcagaaattggcgaaaacgttcatattggtaacttctgtgaggttaagaaggcttacattggtgaaggaacaaaggtcggtcatttgacttatatcggtaatgctactttaggtaagaatattaatgttggctgtggagttgtctttgttaactacgatgggacaaataagcaccataccaatgttggggaccatgcctttatcggtagtaacagtaacctagtggctccggttaatattgccaaggattcatttgtcgctgctggttcgaccattacagacagtacagaacaatatgatatggcaattgcgcgggcacggcaggttaataaagaaaattatgctaagaagctaccatggtaacttgctttttgcctcactaatttatattatgtaagtggtagtagtataacttttattaatcagcggaggacctaatgacacagcaatattttgatcaaaatttaaaaatctttgcgttaaattcaaaccgtcccttagcagaaaagattgctaagcatgtcggtgttgatttaggaaaattatctgttaatcgttttagtgatggtgagatccaaattaatattgaggaaagtgtgcgaggagacaatgtttatgtcatccaatcgacctctgccccagttaatgacaacttaatggagttgttaattatggtagatgcacttcgtcgtgctagtgccaagacgattaacgtggtgatgccatactatggttatgcccgtcaagaccgaaaagcacggagccgtgaaccaatcactgctaagttggttgctaatatgttgcaaaattccggtgttgatcggattattgcacttgatcttcatgccgcacaaattcaagggttctttgatatccctgtcgatcatttgatgggtgctcctcttttagcagagtattttatcaaccagggtgttgctgaaaatgcagttgttatttctcctgatcatggtggagtaacacgggcacgagcacttgccgagtttttaaaatctccaattgcgattattgacaagcggcgtccacgggcgaacgttgctcaaatcatgaatattattggcgacgttaagggtaagaagtgtattatgattgatgacatgattgatactgcgggaactattagtttaggttcgcaagcattaatagatgccggcgcagaagaagtctacgcatcatgtacccatgcggtattatctggcccagcaattgaacgtttacggaatgcaccacttaaagaagtcgttgtgacggactcgattcaattgccaaaagaaaaacaaatcgataaaatcaagcaggtatcggttgctccactaattggggatgcaatcaaacggattaacgaaaatcgtccggttagtccactatttaagcaagtattccaaagtgcacagttggaaaagaagtaaggcttaagtaaattgagattagtaaataagtagggactgtgacataagtcaagttactttcataaaagacaaatggcacagtacaccaatggcttccaacgcccggtaaaaccgaacgttggaggcctattgttgcttgcggggctcgaaaacgaagtcacaagtgacttctgtctcgcttcctttcttatattccatttctgtatttaaaagaaaataaagatttgggaaagacaaacagtcattatcaattcatgttataatacgatgtgaaataaggaggagaaaaatgacaacaattaagtttttcaaaaaagcaatggttggaacagctgcagtcgctactatctttgccttagctggttgtggtaaacaatctgcgtcaagtagtgatacaagttcttccagcacatcgtcgtctgtccgttcttccgaaagtaaagcttcaaaggcttatcgtacagctaataagcttatccaaaatcatgattatgaaggggcttatgaacagttaaaccaattaaatgatcataatgctcaaacggaagcacttgctgatgatttacaaagctacatggatgcccaaaaagcatatgaaaatggcgattatgatggtgctaagaacaaattgaaatcacaaaagtcaactagtccggcaatgcggaatgcatacgctgatttacaaagcaaggtaagttctgcacagggttctactagttctcaaacttcatcatctactaataatagcaagcaaacaaataagcaatccggttctacaagtgcagcaactcaacaatcatcctctgctgctaaccaagctgcatctgatgcaactagcgataatgtagtacaacaatttgctaacaagatgggcttcagtggctcccaaggttaccaaattatgccaactggtaagactggtaatgtttacaagtttgaagtacgtcaaaacaatagtgataacactgttgctaacttaatcggtatttaccaatacaatagtcaaactggagcggtaacaaaaatcgcttaatatataaaagatgacaaaaataaaagcaagaggtgtagaaagtacgcttcttgctttttatttctgtctttacttaagaacatatttttcaatcgcttttccaacaccatcatgattattatcagcggttgttacgtcagcgatctttaaggtaccaggaattgagtttcccatcgctacccctaacccagcaaattcgatcattgaatcatcgttttgtgcgttgccaagggccattacttcttcttttttaattccgagttcttcgctaagtaattgaagggtatttcctttacttgcttgtttattcatgaattctagataaaagtcttcgctgcgaacaatggaaaagcggtcacgcatttctgccgaaagctctgcccaggctttgtcaatttgttctttagtatcaaccatcattgctttggcgattacgtattgatcttgcattttagaaagttcttcaaaggtacgataacgaattggcatacttacaaggtctgactcgtagactgtataaggactcaaatcccggttaattgtgtagatgtaatctcgcgtttcgatttgggacttgacgccttctttaatacaataagtttgccagtctgcatagtcattgaaaggcatcgtgtaatttaccaggacgttcccactagttgattgggccagtgcaccgttgaagctaataacaaattcgttatctgaatcatttaagcccaattggtcaaggtatgcttttacgcctgtcattggacgtccagtgcataagacaatctttactccctgcgcgctggctttttttattgcagcaacagtttgtggtgtgatttcacgttggtcattgattaatgttccatcgatatcgattgcgactaatttaattgccattatttttgctcctttgggttaataatatgattattcttgatatagctttgaaattcttcatagattggttcgaaaatttcaatattgtttcgcgtttcaagcatctcttttgggaaaaagaaccgttgatctccggcttctcgtcccgatacgctagcgactaaggtactaacttgggatagttccacaaaatcgccattaggttggagaagctcgatttgcgtttgagtattagaatcttgtggatgataagtatcatatggaagtttaaaactatcgttgactgcggtgtaatactggctattaaacccagcagtttggatgagctttcgtaaagttggtaaaagtttttgtgtattttgatcataaatgactgatttaaatggtcggcggttaagaaaacgactagcaaggtcgcttaaaatatcatcacgagaatgggtccaatgaataaaataggtggttaagacaccatcgtcaagcgccaaatagtcatccaaggtaaacttaccattaaaaaacggcatcagcatatgaggggtgaagtcgggctcaaagtcattaggatgttggtaaatatattttgcccgcattaagaggtggtctaagataacttccattgaacgggaaactgggtgaaagtagacttgcagatacatttgaaggcgactgataatgtaatcttctaccgcatgcattcccgaaatttcaaaggcaattcctctcttaactggtcgcataacatgaagaacacgatcaagatcaaactttccgtagtttgttcctgtgtaatacgcgtctcgttgcaagtaatccatccggtccgcatcaacttggcttgagatcatttgcaccacttgtggattttcataagtatggtcgatcacactagcaacttgatgaggaaaatcaggggatacccgttgtaatattttattaatattagtgctgctgtcggtgatcaactggcgggtaatttgctcatggtttgtatggaaaatatgctcaaatgtatgggaataaggaccatgccctaaatcatggaggagggctgcacataaggcaactggtcgttcgtgatcatcccataggccgtcgccaggatgctgactaggatagtttcgctggaaatagttgcacatttggcgggtaatttcatagacgcctaagcaatggccaaagcgggaatgctcggctccatgaaaagtaaatgatgaagttcctagctgcttgattcgtcgtaatcgttgaaactcaggagtattaattaggtccataataatttgattatcgacaataatttgtccgtgaattggatcgcgaaaaaccttttcacggcgaagtttttcgtcataaaagtgattcatattaatcttctttctctaaacgttcttgtaaacgttccatgctgattagttctttattgagggttgatataaaattaggcgaccacattaagttattaaggctgtcaggaacaatgatttgaacgactgattggattcgctggatcgcatcctgaacgcttaattgcgtgttgagggctttagagatagttgtcatcgctcccggccaaacatctggaaaatgccacttattttggctttgctgcaatcctgtatcatagaagtcacgaattagtttgccccgatcctgctgattgccaccgacacttaagtaaagcattactgtaactcccattttgtttcggcgttgggaaatgccaccgattttttggccgttaacgctgatatcaaaactccccggacagtatgaatgagtgatttcaccagtagcgatttttaggctaggaaaagcagcctgaattaggtcgaccattcgttgatatgcttcatcaatagttaattcatggtcttcgaggtgccatggatagaaaattgacaggtttaaaataccgtcgtcacttacaactgctaatccccctgaattacgcatgaaataatgaaaaccacggtgcgtaagcgaagtaagggcagttgataaatgcggtaatcgttgatcttttaaccctaaaataaccgtatcttctaaggtccaaaaatgaagaagaggatatttgagtttgttagctgaacgtaacaaagcgttggtatagatgaaagacgaaagattatccgctggagttaaaggttgaataaaccgctgaaaacactgattcttaaaattagccatcgtacttcttcttttctatgaaataatatatctatattatacaagaacttacgagaacatggatatttcacggggtatttatccataaatttgcgagaatacccccacttctataagtaggggatgaatcgctctcttaaagcacgttagtgctttttcttttgttctatgatatatttagtatatatctataaaatgtggtgataacaatagaattggatagaaatcagcattcagtatacttacttaattaccatttggtaatggtggttaagtatcgtcgaaaagtaattaacgatgaaatatctgaatatcttaaacatcgttttgtagttgtgggacaagcatacggcattaatttgcaagaatggaattatgatcaggaccacgtacatgttttgtttagagcaacgcctcatacggaaatggctaaatttttaaatgcttacaaatcgtctagctccagaatgatcaaaaaacaatttccagaaattaagcaatatctttggaaatcagccttttggacacaaagctattgcttaattagcactggtggagcgcctttagaagttgtaaaacgatatattgaaagtcaagggagaaaataatggttctaaaagccgttaaaatgcgcatctatccaaattcagcacaacgaaatcagctctggcaaaccttcggttgtgttcgttttgtatggaatcaaatgcttaatatgcaaattgaacggcgcaagaataatccggaagctaaatttgtgaatgcctttgggatgaataatctgttgaaacaacttaaggttgagtatccttggttgaaacaagcagaatcaactgctttgcaaagtgctaatcgcaatttagccgatgcttttcaacgcttttttaaaggtcaaaataagttccctcgatttaaatccagaaaatattctcagagctacaattcaaagtacgttaatggcaatattaaagttttagattgccatcatataaagttaccaaaactcggtatcgtctattttagagctggtcgattgccaatgggtaaaattaagaatgtcactgttcgtctgaacgttgctggtcaatattacattactgttttagtggaaagcgaaaaccaaactcttcctaaaacaagtaaatatattggtggcgatttaggacttaagtcattacttaatctttcagatggatgcaaggaaccgatcaatcattttgaagacaaataccataaaaagttgtatcgttgggagaaattgcgtagtcgtcggttcttaaaggctcagcaggaaatcgcctgggatcatcataataaagtgttagttccacggcaattagatgattttaagaattatcagaaagctcgtattatggtggcgaagtatcgacaaaagattgccaaccaacggttggatcagctacaaaaattcactactaaattggtcaaaaagtacgacatcattgtgttggaaaaacttaatactaagggaatgatgaagaatcaccatttagctagagcaatcgctaacgctagctggtcaaaattagtagatatgttgcaatataagtgtggctggtacggtaaaaagcttattcaggtcaatccgtcatatactagccaaatttgtgctaattgtgggaagaataatcatcggttaggattgaataaatcggaatggttagcggtacgtgagtgggattgtccaaactgtggtaaacatttagatcgtgatattaacgctgcacaagtcatcttgcaaaaaggattagctatccgatagataaagttaggctcgggacgagccttggctaatagtcgtaacctctgcttgaaggttcgttcagaatcggtagggtaagtatgcgatgtttccagaatctcccacttcaagcattaaaccgtaggtttagctaagtgggagtagttcaatggtaaaaagagtataataatgacgatgagcaaagtgaaaggaggagtttattatcaaaagtgtaattcctgttcatgtaaatctctcaacgatcattgatcaaaatggacagcaagaaaaatttacctttactgaagaaggtacttttgttgaaatgaatggtaagtattatttacggtacattgaacaccaagatggtcaagaaacgccggtccaaattaaatttgaagatgagctaatccgcttaagaaggcgtggaaatgtcgaaacaaacctatttttagacccaacacaagaaaccatcatgcggtaccaaacagaatacggcatgattaaaattgacgtgttaacagaaagtttggaaaaagacgttgatgtaaaggctccggctggtcacctttctgttaagtaccaactaaaacaagcgggacaattaataggtagttaccaactagaattgcaatttgctgcttaatattgtatgatgtagtttagactttttgaagggatgtgcaccaatttggatttaaaggtttttgacggtcaggacaaatcagaactttcaatgattgaagtcgcacacgctattttagctcaccatggggaagcaatggcgtttgttgatttaaccaacgaggttcagcaatatctgggtaagagcgatgaggaaattcgtgaacgtcttgcacagttctatactgacttaaatgttgatggcagttttatttcccttggtgacaacacctggggtctgcgtgcttggtacccattcgaatctatcgatgaagccacagttggtgaaaacgaagaagatgaagaggatgatcgtccaaagaagaagcggcgtaaagtcaatgccttcctcgcagacaccgatgacgatgatgatgtaattgactatgacaatgatgatcctgaagatgaggatcttgatactgacgatgacactgattctgaagatgattatgatgacgacactgatgacttcagtgacgacgatgatgatcttgacgacggtattgaaggtcagctatcagaattacatgatgaagaagatgaagacgaggatgacgaatgattttcaactttgtgcttgactattatttattgaccctgtattatttttcttgggcgcctgtaaaaacaggccaataagttcgtagataaataagctccctgtttcagtgttttatttgaaatagggagttttttctattatcacacccgcaaatataaaaaaggagtagacgacaatgacgaaatacatttttgtaaccggtggagttgtatcatcattaggaaagggaatcgttgctgcctctttaggacggttattaaaaaatcggggcctgaagattgcaatccaaaaattcgatccttacatcaatgttgatcccggtacgatgagtccataccaacacggtgaagtttttgtgactgatgacggaacagaaactgatttggaccttggtcactatgaacgttttatcgataatgatcttaataaatattcaaatgttacaacgggtaaaatctactctgaagttcttcgtaaggaacgccgtggggattaccttggtgggacagtacaagttattccacacatcactaatgccattaaggacaagattaagcgtgctggtgaaagtactgatgctgaagttgtaattaccgaaattggtggtacagttggggacattgaatcacaaccattcatggaagctattcgccaaatgaaagaagaagtgggtagtgaaaatgtattgtacatccatactaccttagtaccatatcttcgtgctgctggtgaaatgaagactaagccaactcaacacagtgttcgcgaattacgtggtttaggaatccaacctaacattttagtcgttcggacagagcaaccaattactgatgatatgcggaagaagatcgccttattctgtgatgttgatcctaaagccgttgttgaatcgatggatgttcataccctttatgaaattccgttaaacttacaaaagcaaggaatggatcaattggttgtcgaccactttggtttaaacgtgccagaagctgacatgacagaatggactgaaatggtaaatcatattgaacatgacttaactaagaccgttaagattgcgatggttggtaagtatactgacttacaggatgcttatatttcagttaatgaatcattacgtcatgctggttatcctgtcaatgctaaggtaaagattgaccactttaatgctgaaaacattactccagaaaatgttgaagagacattgaaagactacgatgggattcttgttcctggtggttttggaaatcggggagtagaaggaatgatcactgcaattaagtatgctcgggaaaatgatgttccttatctcggcatttgcttagggatgcaaacagcatgtattgaatttgcacgcgatgtattaggctacactgatgcaaactcaactgaatttgatacaaacactaaacacaatattattgacttgatggcagatcaagcggacattgaaaatatgggaggaacacaacggcttggtgcatatccatgtaagcttaagccaggaacagttgcggcagcggcttatggtaaccaatcaatgatcagtgaacggcaccgtcaccgttatgaattcaacaacgactaccgtcaagaaatggaaaaccatggtttagttatttctggagtaaacccagatcggaatttagttgaagtagttgaaattcctgataaaaaattcttcgtggctgctcaatatcacccagaattcaagtcgcgtcctaatcatccagaaggattatttgctgcatttgtaaaagcagctgctgaggacaaataaaaattaagttgtataatatatttaatacaagagatgggggcaagaatgtcgcttctcttgttttttgtttagtagaattgttaaattttaagttaaatatgctaatttttggcctgaccttatgattttttttaagattgtttataaaaggttgtaattctcttgatatttcattatcattacagttgactgttttgtaactgaaataatcattaacttagcttaaatgaaaaacagactaaaatttttaagtgaggaaacgcagaaatgaagaaaatgatcattcaaggaggaaaccgtctttctggcgaagttacgatcggtggtgccaaaaatagtacagtggcattaattccagctgctattcttgcggatacccctgtagagtttgacacggttccagatatcttggatgttcacaatctgatgattattttggagtcaatgaatgtaaagtccgagtttagtcacggagttttagatattgatccaacacaaatcgtagaagctgaacttccaagcaaggcaattaaaagtcttcgggcttcctattactttatgggtgcattattaggtcgtttccatcgcgcgacattaacatttccgggaggcgataatatcggcccccgcccaattgaccaacacttaaaagcatttaaagcacttggagcaaccgttagcgaagaaaagggtactgttcatttagatgcgccgaatggcttacatgggtctcggatctttttagatatggtatcagttggtgcaacgattaatgctaccttagcagctgttcgcgctgaaggaacaacgattattgaaaatgcagctcgtgagccggaaattattgatttggcaacattcttaaataatatgggcgccaaaattcggggtgctggaaccgatactatccgtatcactggagtaaagacacttcagtcaatgaatactcatacaattattgctgatcgaattgaagcaggaacatacctatccttggcagcagcgcttggtgatggggttatgatccataatgttattcctgaacacttagaatcatttaccagtaaaatgattgaaatgggtgttgaacttcaaatcgatagcgataagatttatgtaccaaaatccagtcatttacatccggttactgttaagacaatgccattccctggttttgctactgatttacaacaaccgcttaccccattgatgtctcttgctgatggtgatagtacgattgttgataccatttatcccaagcgtgtaaagcacatttcccaactacaaaaaatggggatgaagattgaagcacatgatgggatgattatcgttaaacatacagaaaagcttcatggcgcagaagtctctgcaggtgagattcgtgccggagcagctttaaccattgctggattaatggcagatggacagactgtaattaataatgccggaaatattttacggggttacgatcgaattgtatggaagcttaatcgccttcatgccaatgtttctattgaggacgattcttcagtaaaaattggttagaagttgcgtacttctttaaatcgtggtatcctgttagagttgattatctatgtttcaggcaatgattcatggcaaaaggagcgtaataaattatgaaacaaggaattcatccagattatcatccagtagtttttgaagattcatctactggttacaagtttctctctggctcaacagccacttcaagtgaaactgttaagtgggaagacggtaacgaatacccattaattcgggttgaagttacttcagattcacacccattctacactggtaagcaaaagtttactcaagccgacggtgctgtcgacaagttcaacaagaagtacggtctcaagtaatcgaacttcttataattcaaaaaagccgggaaaagcgaaagtttttcccggctttttttgaattaagtctaataaatcattattaacgttattttgcgtctttaagtattgatctttctctgcgtataatattgataattgagaaagtgggggctacctatgcatgaaaaaataattaatcgaataattgctctgcatcgttattcttttgttagaataactcggcagacattaattatgatttttcccattgtttttattggaacgatggcaaagatgattttgaaaactgtttttaaaccagatggatttatttataatattgcttttcttgatgtaataccacagaacgtgttgcggattattcaatttatgttaactagcattagtcaattaaccttagggattctaggaatttatactgtttatatggcagcaaaatttacggcgaaaaggtatcggcgagacggtaaatttgccggaataaccgctattttgacccttttactaatgtcttatcgttatggcaagtcgtccccgcaattttcccttagcttttatcaacggctcctcagtggcaatagtttgttaatcgttttaattcttggttacggaatcggccagctttaccggtggttaaccccgcccaaagatggtgataataccaatgcgttgccgttattacaggaacgatcatttagttcaatgctgccaatgacaattagtcttatttttggagtgacggttgctcttttcttaaattccaacacaatctatcatgcttggtcaacaagttactccacgttagttacgactgcccaagagcatcggcaattatggctgacgttattagctacaatggggctaacaatatttgattggttaggattaggtgttccatacacttcgatggcgttaacctctggagattcatttactgctaacttgaactatgcgctcgctcatggaactccgtggaatgtaccgtatgagtttttaggcagttctctttataattcatttgctaactttgggggcgatggattgatccttgccttgatagttgccattctgttaacttctaatggctcctatatgcattgtgttgcccagtggacggccttaccaacactatttaattttaattatgcggcaatgattggcttaccggttgtatttaatcccttatttctgatcccatttgtcttcttaccgattgtaaacattctccttgccagtttagcgattgcgattaacttaataccttcaacaccttacccggttttgcaggggacaccgggaccccttattagttttttggggacaaatggtaattggggaattttgatttttaccttggtattgcttttaatcgatagcgctgcctatatcccctttgtaaaactggccttagtcgttgaaaatcgcttaatattagcagaacaggacgtgatcagtcatgaaaaaaatgactaaatcaattctccacactcgtttagtattgattggcctaatattgatcttagtcctaatggcaattccagcatattattggatgaaagatacaaataaatatttagctgcccaacataattctagaatgtcgccgataattatggttcctggaagctcagcaacacaaaaccgctttaatccacttattcgtaaacttaacgaggatagccctaaaaaacatagtgtgttgcgcttagaagtaatgaacagcggtaaaattgtttcgcaaggatggataaatcgcggcgataacgagccgattatcgtgattggctttgagaataatcgcgatggctatcaaaatataaagaaacaagcgcaaatggttaataaagcctttgaacgattgacggaagagtataattttaataactttaaggcgtttggccattccaatgggggtctagtatggacttattggttggaacattactactctgaatataaagatgcgattacaattaaaaggctaatgatactgggaacgccatacaactttgcggagtcttctgttagccatccgacgcaaatgttttctgattttgtaaagtatcgaagtcgaattcctaaaaacttattagtttattcggtcgcagggacagaaacttatacatcggatggtctcgtcccagaaggaagcgtcgatgccggtaagtacatttatcaaaaacaagtggcccattatacgagtatgacggtcacgggaaaagatgctcaacactctaacttgccacaaaataaacagattgtacggttaattgaagagtatttgcttgatccaaatgacaacggtaatcctaattcgcaaaataagcagggggctactcaaaattaattaagcaggttatactaagttcataataaaaagtaaggagttcaatatcgtgaaaaaagataaaaagcgatcatttgaatggttatggtggacagcggttgttgtactgttattgatttcagttgtcttaatttttaaccaacagattaagtcttacttagtagggagttataaacctgagattactcggcaaacggttcaaagcaaccaaaagaaaaaagcgacctatgattttcaaagtgtcaaagatcttaacttgcaaacggctgccaaggctcgtgcaaataagcaatcgattaataccattggagcaattacggttccggctattaatatgacgattccaattgctaatgggattgataatacaacccttgcgttagcagcaggaacccttcgtccggacatgaagatgggggaaggtaactatgcgttagctggtcataatatggcccacgggagtaaaatcctattttccccattgtattatcatgctaaggtgggacagatgatttatatcaccaacatggatcgcgtttatgaatataagatttatcaacgtgaattcattgcggcgacccgggttgatgtggtagataatacaccggaaaagattattactttgatcacctgtgatgctaccgggaccaatcggttgatgatccgcggtaaatttgttaagtcagaaccatttacgcaagcaccacaaaatgtgcaaaagaattttagcgagaaatatacaacaggtcgttaaacaacctaagattagttcaggaagcgagacagaagtcacttgtgacttcgtttttcgacgcgaagcaagcctctgggagccctcgcaagcaacaataggcctccaatgttcggtttttaagccggacgttggaggccattgttgtactgcgtatttgctttttatgaaagtaacttaacttatatcaaagtccttttttgcttgcaaatttttagcaatatttgtaatccattccaaattaagaaaaacacaatgacgataaaaatagccaaattaaaataaattttaagtaaacagatgagcgaacggacaggaatgccaccgtttgctcatttttttgctgtaaataaatttcttgactcttttttaggaaccacctaagaaggagatacattgaatttaaggagatgcagtaatggaaaaacgcgaacaaatgaatgttttatggtttgatgaattgcatcgctcggacgttaatctcgttggtgggaagtcctcttcattaggggaaatgacttctgcaatgaaaattccagttccatatggatttgcgacgacaactcacgcttatcgtcaatttatggcggaaacgggattaaacgaccaaattaataaattattagccgaaattaatgactatgaaaatgctgacgaacttcatcgggtttgctcacatattcggcagatgattgtcgaagcaccgatgccaagtgagatcgctatgacaatcaaaaaagcttatgcagccttatcagaaaaaatgggtgaaactgaaccatttgtagcaattaggtcaagtgctaccgctgaagatttaccgaatgcttcttttgcggggcagcaagaatcgtatttgaacgtgcgtggagctgaaatggtattagcaaaggttcaagaatgttatgcttccttgtttaccgatcgggcaacctattaccggcataagcaacattttcctcatgaaaaagtggctttatctgcggccgttcagatgatggttttctcaaaagcttctggggttatgttttcagttaacgtggcgaacggaaatgatgcccaaattgttattgatacgatttggggattaggtgaatacattgttttaggaaaagtaacaccggatcattttgtgattaataaaaataaccttcaagtagtagaacgttcggtagttccgaaagcaattgaattgtgtcaaacccctggtggcggagtacatgaagaaccggtgccagcagaccgggcaatccggccagcgctaactgaaaaccaaattcatgaattagcaggatacgcaaaggaaattgaaaagcactatggttgttacatggacatggaatttgcgctagacgcccgcacagatcggttatggctagtacaagctcgtccagaaacggtttggtcgaataaaaataataagcaagcaacaaaggagtccactgtctcaatgaataaaactaaaaaaatcttggtcaaaggattaccagcaagtccaggcgtttccactggaaaggtacatgtaattgcggatcctaaagatattgatgaatttgaagaaggagaaatattagtaacgttgatgacttcgcctgattgggtaccggcaatgaaaaaagcagcagcaatcatcactgataatagtggaatgacctgccatgccgcaattgtttctcgtgaaatgcagattccgtgtatcgttggaaccaagagctgtgggcaggcagttactgaaatgctacaagatggtgaacaagtgaccattgatgctaaaaatggagtcgtttatcaaggtgatctcgcagaacaatttaatggcgaaaaagagacaacggaatgtcaccatgcagaatattacccgccgactgcaaccagggtcatgatgaatttaggcgatccagaactagcagaaaaatatgcagaactccctgttgatggcattggcttaatgcgagaagaatttctttggacgacttatattcatgaccatcccctctacttaattgaaactggtcatcccgaaaaagttgttgatatgttagcagatgggattgctaaagtggctcgggcgattgctccacggccgatggttttacgtttttctgattttaagtcgggagaataccgtaatttaacgggcggcgataaatatgagccccatgaacctgccgacttattgggatggcgcggcgcttctcggtactatgatcccaaatatatcgaagcttttaagctagaacttgcggcggtaaaaaaggtgcgtcgagaattccagttaaagaacctcaatgtaatgattccgtttgtccgcaccgttgccgaagctgataaagttacaaaattaatggcagctgccgggttacatcgtggtccagattttaaggtatacatgatggccgagatcccaagtaatatcatcttggcagatcagtttaataaatatgttgatggttattcgattgggtccaatgatttagcaatgcttattttaggttgtgatcggaataatgatacagtggcccacctctttgatgaacgtgatcttgcggtgaaacgtgcgattagccaccttattaaggctgctcaccaagataacaagacggtttcaatatgtgggcaagcaccatctgaatatcctgaattagcatctttcttaattcagcaagggattgattatatttcagttaatccagatatggttaaagaaaccaaacagaacgtggcaaggattgaacagcgcataatcctggataacgcgacgggtaagggacgacaagctgtggaaaattatgcatggtagaaaggattgaataaaatgcaaatttttgttgatattaatgcttctgaaaacggtaatggttcacaagagtttccgtttaagtacatccaacaagcggcagatatcgctcaaccgggggattatgttcaagtaatgccgggggaatatcatgaggaagtccatccacaatattccggcactagtgataagccgattatttatgtatctgctaagcaaaatcgggcaatcattacgggcgctgaccgtgttactggctggcaacatgttgctggtccggtatggcaattaaaactccctaatgccgaatttggtaactataatccatacaacgttttagttgatcaaacctttaatcatgccggtgaaatcttcctaaataataaagcaatgtatgaagttgatcagttagcaaaagttgaaacaccaagtgaaaacaaattttcccaagaccggaaatttacctgctatacctggtataccgaacagttgccagcagaagattcaaccgtaatctatgcaaactttcaagcgcaaaatcctaatgatgaatatgttgaactgactttccgtgagacgtgtttctatccagaaaaagcaggactcaatcaccttattctatcgggctttacaatgacgaaggctgcttgtcgatgggcatcttcgcaatataataaggggattattggtactaatcgtggtcagggatggaagattgccaagtgtgatatttctcacgctaagtgttctgggatctcccttggtcgaaatattgttccaaccattgacgatgataaggtttatccacaccggattaagaacaatacgattcatgattgcgggcagactggaattatcggtgttgaaggcaacccatcgccgattattgaacacaatagtatttacaacattaacgtccgccaaaaccttgtcagtgatgatgtcagtgcgatcaacctttcgccagcgattggggctaagattttacgcaactgcattcatgattgcacgcgcggaatttggcttggtggcaaggttgaagatacccaaatttcacggaatgtgttctacaacaattcactgccagattcatttgaagtcacaaacgaaaatcgggaggacttagtagcggcccttggtgaagatattgaaattaaggattcgatgggtgtgaccttgattgataacaatttcctattatcggattatgcgcttaagctcgaatctaagggcgtccttctcgttcataacctaattaatggcagtgtggaatggttaagcaatacgaatgttgctgaaaatgatccttactaccaccgcctttatcaacaaaatgcgccagaaagtgctccttacgattcttcttgtttctataacaatgtctttatccggaagaacctccggagtgaaatggcaaaattaattgcatttgcccacaaacaggcaagtgaacaaccaatcgataatcatattagcgatgataatgctgcttatgttggcctagccagtggacaacgaagctatattccagctaataaagcaggaaatatctttatgaatgatgagcaagaagacgttaaggtcgccatcgattcaagtgaagatggggtatttcttaatagtaatatttgcgactacttgaatgaagatactagtcgggtgatcgcggttggtgttactcccgagactgcccgtgattttgatacagatttcttagggaaacatcgtgaaggaattagtgtaaccgctggaccttttgatacgaaagaagaatatagtcaacgcttatttagactactgttttaaggaggtaaaggaatgcgcaaaccgtttattattgcgaactggaaaatgaataaaaatgttcatgaatccgttgcgtttgttaaagcaattaaagaaaaactcccggcaaataaagaaattgggatcgcggcacaagcagtctcgctctataacatgaaaaaagtggcgggatcttccaacttacaaattattgctcaaaatgcatctgctgagttagagggaccgtatactggagaaattagcatgcgaagtttagcagatgcgggcgtaacatacgtgatgctagggcatttagagcgccggcgcctttttaacgagaataatgaatcaattaatcaaaaagttttagcagccctcaatgctggtattattccaatcatttgtacggatgaagagatggtccaaacagaagttaacggacaaattcattatgtatttcgccaactaaaaagcgtccttaaaggggtaccagctaataaactatcacagattgttatttcgtatgaaccaagttgggccgttgggagcacgcatcaagcaaatccagacattgcggaagagggatgtcaggcaattcgtcaaagtctagttgaaatgtatggtaatgagattggcgagcaagtccgaatactctatggtggcagtgttaatcccgagaatattggtcaaattatgagtaaaccaaatgttgatggggcgctaatcggtcgcgcaagtctcgagattgaaagcttcttacaaatgattaattatatcgaattagcgagcaagcagaagttacaggtaatttaggaggaagaatgatggcttactttgataacggaaacaaactttttgatgatgcacggaagaatcaatacgcaattggggcatataatattaataatcttgaatggacccgggcaattttgcgggcggcagcggagactaatactccagtgctgatccaagtttcaatgggagctgccaaatatatgggtggttataaatttgtcaaagatatggttgaagaccagatggatgcaatggaaattaaagttccagttatcctgaatcttgatcatggtgactatgatgcagcgattgaatgcattaacttagggtattcgtcagtcatgtttgatggccataagttgccgattgaagaaaattacgccaaaaccaaagagattgtccaattagcgcattcacgcggcattgcggttgaagccgaaatcggtaaagtgggagaaaatcaggataccagcagtggagaacttgctgatgttgaagatgcaatggcgtttgcagcaatgggggttgaccgtcttgcttgtgggattggtaacattcacggcatttaccctgctaactggccagggttagactttgaccgccttcaagaaattgcgaatgcgattgatattccgctagtgcttcacggtggttcaggaattcctagagaacaggttcaaaaagcaatttcaatggggattgcaaaggtgaatatcaatactgaattccagttagcgttccaagatgcaacccggaagtatattgaaaatgaattagacctcaataaagaacaaaaaggatatgatccgcggaaattattacttcccggaacagatgcaataactgctaaaatgaaagatatgattgaatggttaggcacgccagcagtcgcctaattataatggaggttatcgaatggcaatcacagtttactttgtccggcacggtgagacctacttcaaccggtttgctcgcctgcaaggatggtcagataccccgcttacagaaaaaggagagatggatgctaaaaagatcggccaagttttagcggacttaaggatcgattaccttttctccagtgatttaaaacgagcagttgatactgcacggcttttaattgcggatcacctaactgcgacggtgaaggaaccaatccaaaaaaagttcttccgcgaggtattttatgggtcttttgaaggtcatagtaatgaagaaggcgctatctgggcaagctatcttgaaggcaagcgatttaggcgtatcggtgaattagttgatgagtttggcgttgaaaaagcgcatgacttactgaaagccgccgatccggctcaccttgcagaagatagtaatgaattaaatgcccgtgtagagcaggcaattgcctttttgcaaagcttaccggatgagagtaatgtggttgtagtagcccatggatcgattatccaatatattgcggggatgtatgggaaacctggatacaagtatgaaaacttacataacggcgcgctgatgaaggttcagctaacagctagagacgttgaaattactggatacaatcaatttaaactataaaaagaggcaaggaattattttccaaacctcttttgttgttaggacaattctttagtaattttatccagccataatggcaatgtctcgtttaggctattgtaagtatcttcaaagcggtgagtataccaaggatcaggaatttcttgatcttctttgccaggaattacttcatatgctaagtggactttatcacgatcttgcgctggtgcaatgcgttgtaagttgtacttgttcatattatccatgcagatgatgtaatcagcccactcgaagtcttgtcgtgtaattggacgtgagattaagccatccgttgataacccgtgtgcgtgcattgtctttgcggcacctgggtggggaccatttccttcttcttcgttacttgttccagcagaatcaacattgattttgccatttaatcctgcgtcatcaaccatttgcttgaacattgcctcggccattggtgaccgacaaatgtttcctaagcagacaaataaaacgttcatgtaatcacctcgtttatacttctatcataccgaaaaagataatattttgctaaaatattcgggaatcctaacactatccttaagtttttggtaaaattaagaacaaatatttttagaggaggaacaaaaatgacccttattattgtaattgttgtcattgtcttgttgattgctatttatgcaggactttacaacagtttgattcaattgcggacacacgcacaagaatcctggagtcaaattgatgttcaattacaacgacgtaacgacttgatccctaacttaatttcaacagttaagggctatagcaagtatgaagcgggaaccttggaaaaggtgacaaagctgcggacggaattaaatagtattccagacagcgatcatgctaaaaaaatggaagtttccaatgaattaacgggaactttacggacattgtttgccgtcgctgaaaattatccagacttaaaagcaagtgctgaataccaaaaattaatggaagaattaaccaatactgaaaacaagattgcctactcacggcagctttacaacagtactgtggcggctttagatgctaagattcaatctttcccaagcaatattgtggctaaaattcatcacttccaacaaatggattacttacaagtgccagaagaagtcaaggctgtgccaaaagtttcatttgatgatttaggtgattaagcatgttatatcagcaaattgcccgtaataaacgaaaaacaattttggtgatgtttgggttctttgtattgcttgctttaattggggccgcgattggctatttatttgcgcggacagcgattggcggcatgatcattgcggcgattattgcggtgatctatatgtccgtgatcattggtcaatcgactgatgtagtgatgcggatgaataacgcgacggaggtacgatcagcgagtgatgcgccagaactttggcatattgttgaagatatggctttagttgcacgggtaccaatgccgaaagtctatatcatccatgacccaagtcccaatgcttttgcgactggtaatgatcctgagcatgctgctgtggccgctactactggtttgatggaaaaaatgaatcgtgaggaactagaaggggtaatggcccatgaaatgactcacgttcgtaactatgacatccgtctgcaaacaattgcgttagccttagcatccgcaatcgcaatgcttgttaattttgctggaaatttctggtggattggtggtcggagcagtagtgatgaccgggataatccatcaagtattttcgccatccttggttcgattcttttgattatcttagcgccattggcagcaaccattgcgcagatggctctttcacgtaatcgggaatacttagccgatgcaggtgctgtggaattaacccgtaatccgcaagggatgattagtgcattggaaaagctaaaaactgctgttccaatgaaacatgtggacccaagcagttcggcattatatattagcgatccagaaaagaacgctaagcaccatcctttttcaaatctatttgacactcacccccgctagataagcgaattgaacggttgcgtcaaatgtaataagtttatagcaaagactgagaaaaaacttttgctttttctcagtctttgctatttttactcacgacttattgtttttaatcgccttatactagtgagggtgatataattaaaaagctagaccaaagtatcaaaagaagaggtatctttttcatgaaaatgaaattagcggaaattgccaaggcgatcaacgcacaaaatgacattgaacaatggaaagacgtagaagtgactagtgtgtcatttgacagtcgacacttagatcaagggagcttatttgttccattgcaaggtgcccaagacggccaccaatacgtaccgagtgcttttaccaatggtgcagtagctagtttatgggctagtgaccatgagataacggatcagacgcacccgctattagtcgttagtgatccactagcggcccttcaacaactagggaagtactacttgcataagatcaatccgattgttgttgcagttacaggcagtaatgggaagacgacgactaaagatatgattgcgtcaatcttaagtacgcagtttaatgtcgcgaagacatatgctaattttaataatgagattggggttccagtaacgcttcttaacatggagtctaataccgaagcagtggtagttgagatgggcatggaccgttttggtcagcttgacttcttaagtaagcttgtaaatcctgacattgccgttattacaatgattggggaagcacatatcgaattcttcgggactcgtgataagattgctgatgcaaagatggaaattacccatggcctaaaggaagatggaacactagtatttaatggggatgaaccattattagaggaacgggtaaaagatcttgcccaacgacagatgcgctttggtcggcaactaagcaataatttgtatgcaacaagtgtccacgatgaaccacggcagttatcatttaccgtcaacgaatggccagatgaagaattcactatcccaatggttggtgaatacaatattaataatgcgttagcggctatggaagtgggtaagattctgcatattactcccgcccacatgaagcaagcgttggcaaacgttgaattaacggaaaatcgtgctgaatgggttaaaggaaagaatggtgaacagatcttaagtgatgtttacaattcaaacccgaccgctgccaaggaagtccttaagacgattgcagaaacaccagtagctggtcgccggatcgccgtattaggggacatgctggaattaggggatgctgcggcaaagttgcatgctagcttagcagaagagattgaccaccaaaagattgctagtgtttaccttgtaggcgaacaaatgaaaaatcttaaagacaagttgatccaagaaggatacccagctgaagatatctatcattatgctgctagtgaccttcaacaattaattgccgatcttacgactactttgacaggtgatgatattgtcctattgaaggcaagccatggcattcacctagaagaagtcttgacggcattaaaagcagaatagttaatatatttgccagtcgattactgatgcttatatcataaatcgactggtcatttttaggaggaaaatttttgaagtttagtgaattaggcttatccgatagcctattaaaagcaatcaaacggagcggatacgaagaagcaacaccaatccaagaacaaacgattccaatggttcttgaaggtaaggatgttattgggcaagcacaaacagggactggtaagacggctgcttttggattgccaattattgaaaacgttgatactgaaaatctcaatattcaagcaattatcatttcaccaacacgtgaattagcaatccagactcaagaagaactttatcgtcttggtaaagataaacatgttcgcgtgcaagtagtatatggtggggcagatattcggcgccaaattaagagcttgaaacaacacccacaaattctcgtggggacccctggacggttacgtgaccatattaaccgtcatacagttaaacttgaccacattaagacccttgtcctcgatgaagcagatgaaatgctaaacatgggattcttagaggatattgaatcaatcatcaaggaaacaccagatgatcggcaaacattgctcttctcagcaaccatgccaccagaaatcaagcggattggagttcaatttatgtctgatccggaaactgtgcggatcaaggccaaagaattgactactgacttagttgatcagtactatattcgcgcgcgtgactatgaaaagtttgacatcatgacccgtttaattgacgttcaagatcctgacttaacaattgtctttggtcggacaaagcggcgggtagatgaattgtcgaagggcttgattgcgcgtggctacaatgcagctggtattcatggtgaccttactcaagataagcgttctaagatcatgtggaagtttaagaacaatgaacttgatatcttagttgcaacagatgtggctgctcggggcttagacatttccggggttacgcatgtttataattatgatattccatctgacccagacagctatgttcaccggattggccgaacaggacgggccggacatcacggggtatccttaacctttgttaccccaaatgagatggattaccttcatgagattgaaaaattaacccgggtacggatgctgccacttaagccaccaacagctgaagaagcatttaagggtcaagttgcctcagcctttaatgatatcgatgaattaatcgcgcaggattcaactgatcgttatgaagaagccgctgaaaagctactagaaactcataatgcaactgatctggtagcagcattgttaaataacatgacgaaggaagcggccagtgaagttccagttaagattactcctgaacgtcctctcccacggcgtaacaagcggaataaccgtaatggcaaccgaaataattcgcatggtggcaaccactaccggcgtaagaatttccgccgtcaccaacatggtggtggtcaccgaaatgataaccatggaaagagccattccagtcgccatgcatttaatatccgtcatcgaaaagaagattaattagctaagaagtctttggttgagatttgaccaaggactttttttaatttggcagattgcaagaaataatttgaacaaagttagtgacgcagattacgcaaaaagatctcaatcggttgacctttggggataaagcgtcgtagtactcggttgcgattctcattactgccccgttcatgtggagaataagcatgcgcaaagtagaggggaatcctggcctgctcttcaattagcttgtagttagcgaattctttcccatggtcaacagtaagggtcttgagattatcttctaactggttagctaattctaaaatggccttggtcattgaggtactatctcgtccctgaagccgtttaacgatgataagacgactcttacgctcgacaaacgtagctattgcttgacctttacgctttccagataaaactgtatccgcttcaaagcgacctgaggtatgacggtcaataacttcagcaggacgatcttcaatggaacgtccatggctaaaagtcccacggggttctttggctcgtcggcggcgaattccatggtcaggtaaatcagccacgtcaatatccaatactccttgatcaatccagttgtagatggtcttgtaggcgattctaactacatgagccacttgttcaatcgaccatttttggatcttaatcttttcttcaattaatcgcttgaggttagtcgttaagatggttttacgcccacgatgactaagtttagcttcatgatcagcttgagctttaactgcgtgatattcaccagtcaaacgatgaacctcattaaagatcgtggttttaccgaagccaaggtaatcagcgatgtatttaagggagcggttttcataacgaagagtttcgatgacaacacggtcttcaaatgataaaatagtggtgcccataaaggtccttctttctaatggaatgttgtggtaacaccattaaagacctttatgggtttttatgtccactaatatgttcaacttaaattttgcaatctaccataaattaaatatgggtttgtgacttaagttaagttacttccataaaagacaaatggcgcagtacaacaatggcctccaacgcccggtaaaaccgaacgttggaggcctactgttgcttgcgggggctcgaaaacgaagtcacgagtgacttctgtctcgctcccatttcgttatcttttttataaaaatatttattctaattatttgatttatttataatatatttgttgcgactattacgatgattagtatctgagaagatgagctcatgtagatattaggctattatttcatcatgcaaattaagtgtaaaggggggctaatttttcttgtttggtacttgaggagctgcagagttatttatgccttgtgtgagagaggttttgacgatgcaaaaattagagcaattgattgataaaaactttgctgaaacagctcatggtaaggttgcaaactatattccgatattaggaattgttgatccgcaacaactgggcattgccatttatgacgttgacgaggacgaaattgggaccgctggaatggcaggaacgagatttgcgatcgagagtattgcgaaggtcataactttaatattaacgatcaagagattaggacataagcgcgtcttagcagaactagaaaatggttcggcagattatagcctaagttcggtactattggatgacgagttaaccgagcaggtccatcggataaattaccttaataattcctccgccttgttaacgacagccttaattgaccagttgatggggcagaatagttttaatgcccttctcgggttctgccgtgagatctgcaatgacccatgcattagcttgaatgagcgtttatttcggtcagtaattatgaatgataaagatattcatgcactggcttactatatgaaagataaggatattttagagactgttgatcaaacattgataacttattttatgcaaagctcaatgatggtgacatcacagagtcttgctaacttaggagcagtcttggcaaatgatggaattaaaccttgggataatgagcgtcttattagccatgaagataacgagttggtaaagaaattgctaacaacagttagctcgtttgaagaatcaaaagaatacacaattaaaattgaactccctattaaaagtggtactggcggcggcttattggcttgtgccccgcaaaaatgtggtattggtatttttttagtccagctcttgatcaacatggcaatagtttggcaggaatgagtttattacaagatgttgttgagcaattagtagtttaataaaagcgaggcccgaagaaaattcttcaagtctcgctttttgttaatgtaatttttcttggaatttctgtaaattaccaggagttggggttaagttagtccattctggtgaaaggaacttactattgatttggtaatgtggttgcggttgcttattagaaataaaactattagtagctttatcaacttttacccaaccagcccaaccgatatggatagtgtcttccataaatccaggcttatcaccatcatgagaaagatcaaaaatatgattgaacccttgttggcgaagctggaatttaatttttttaacagattggtaatacatattcatgtccatccccgtgtacttttcccactttgaattaaccggtgggatgataaagaggacatttgaattggtattcttaaactgattcaaaactacttccaaatcgccatattctggtgacttagtataattgaaatttcgttgtgatccctttgttttcgctaagtttttctttacacgctgggtatagaagctgtttttgataccgaaacggttgttatcagtatcacgtgcggcttcattcattgcatcatcataaagttcattataattgtaatgctgaggaagcttcttaacatttgggaggatatgcttgccatagttattatttaattgaaaacctgagaagatggcatcttcatgaacaagcatgttaagtcggaagcggataactcccatgtcgaaactgctcagggattttccttcagcgatttttttagcatacgaagaaacagtcccatctttgccaagcattgcaattaatcgcgttgcaatgtaacgatcatatggtgatttaggattagcgtgttgaagccagttaaggttagcgagttcaccattatagtacttgaaagctggtggttgaacaccctgcttggtaaaccattgtggtgaaatgatatagactgccttattatttctcatctgcgtttccattgaattaatgttaaagaattgcggaagagattgggtaccccgtgaaccaaagaggaaaggagtatagttatgataacgagcagccattacagaaggatggaagcgatccattcgccgtaattcactagaaccaaagaatggaacatagtgagtgtgcttatcactgagcgcttgttgcttaattgattggttcttaaaaacaacggggcttagtgatactgcagctttatgttcaatcgccgctgagtgctttttactaatcggcagtgaaaacaaaagaactactaatagacaagcgacaatcagcgggccaaagattgaccacagctttttgccattatgcattttggagctcctttacccgttcttcaatcttttcaatagtgtcccattggctacggtcaaattctgaaactggtacttgaacgccaaaagcatcttgtaaaccgagaagaagactaacagttgccattgagtctaaaagaccactttcaaaaaggttttgacttgcatcactaaagtctgcagtatcccgaccagttgcatcagctaaaatattaataatttgttcttgcataattaaaatcctcctaaaattatttgaatagataagtatctaagaacccactgaagatcaagaaagtaaacattacaaagttaaatgtgacaaaaatagcaactccagtagtgaacttattatgtggtagctgttttaagtttttgcgcttgaaacgcagccaccagtcattaactactaggcctagaccttggagaaaaccatagagaatatagtaccaggtaattccatgccaaaagcccattagtaacatattaagcatatatgcggttgatgacaaggcatttcgattcttaaaccatcgttttttggtagcaagaaagacgaaccgcataaaaatataatcacggaaccagaaagaaaggctaatgtgccaacgattccagaactctttaaggtttttcgatttgaaaggctgcttaaagttcatcggggtacgcacacccataaagtaactaatagcaactgcaaataatgaataaccggcaaagtcaaagaataagtaaagtccgtaagtgtacatgacaccgactaagttccaagaagggaatgatggatcagccaaggccgctttttcaaagaaggggtaaaaacgctgaccaaagaaataaccgatgacaaacttgtacaagaacccaaggaataagtagaaaattcccgtattaacaagattcaaatattcctcgcgggtcggaacctttttataatctttttcaaaacgtcggtaacgatcaattggtccagaagtaatggttggcatgaacagaatgaaacgaatgaacttccatggggaaatctctttgatcattccatcacgcgtttcaattactgttccgactgcccggaaagttaaataactaattcctaagaaaccaaggagggagttatgaccaaccattgccggtgagagcttaacaattacaatcggcaaaattgataaggcggcagtgaagtaaaaaacaccactcgaattattattttgccggtagcgatgataagccatcacaataattgtctggtaaataacataagtaattaatgaaattccttgttgccagcttgaaccatcgaacattaagaagataaaaatgaaactaattaatgcttcataccagttaaacctcttcccaaagtaaaggccgattcccaacggcaaaatagcaagaagtaagtagaagaagtataccggggttccataagcactgaaattaggaaggtttgaaatccaatcaatcattacttgttagcctcagcaatcatttgtttaactgcaatcttgccatttgcagacattgggaatgattcacggtaaacgaattgggtaggcatcatgtatggcatgattaagccgtccaagctttcacgaatttgttttgttaatccagccgtatcttcagtagattcgtttggaataacataagcgatcaggtgcgtaactttgccgtctttattatattttggaaccgcaactgcttgtttgattagaggactcttttcaagactggcacgaacttcatcaagttcaatccggtaaccatgtaatttaatttggaaatccatgcggcctttgtgatgaagtaagccatcgctgtcaagggtacccgcatccccagttcggtaagcaggcacaccatcaatcttaaagaatgacttggctgttttttctggattattcatatagccacgtgccacactattaccactgattacaatctcaccttgttcaccgggagtagtgatttcttgatcgccattccaaatggataatttaactccaggctttgcatagccaactggtaagcggtcattattttcaatgatttcaggagtaatctcgattcctgatacggcaaccgttgtttcagtcggaccataagtgttgaagattttagcatctgggaatcgttggtgtaatcctttggcagtctttactgttaattcttcgccacagaagagaaaggtctttaagcttggcattttttgttggttaaatgctgggctaagcattaacatatcagcaaacgatggtgtccctacaaatacctcaagatcaaggtttggtagagcagtgaacatctgaccaaaattttcaacaacttcgtgaggaagcgccttgattgtcccaccattaagtagtgctggtaaccagtacatgtttgaaagatcaaatgaatatggtggctgccctaagaaattagcatgttctttgattttaaattcatcacttagcatccagtcaacaaaggtcataaagttatcatgactaacttcaaccccttttggtgaaccggtagttccagacgtaaagaggacataagctagttcgtcaccattaatcattgctgaagtatcaaaagtttgcggtgttgccaaaattttttcaagctgttgatgatcgacaatcggggcatcaaactggagatcattgcttggaaaatcattaacagcaataatcatcgccggtttagcagtatccagaattgattgcatccgtggaattgctgaatcgttggacactggaatataagtatgtccagcttttagagccgctaaaaagctaataatcatttcaacttgatgatcaccatatacgagaatcggactacgatcaggcaaagattgagtactaagccatgccgctaaagtatcaactgctgagcttaagtccgcataagtggtcgttttgcccatttcatcatatgcgatccgcgttgagttgtccttggcaatttgctcaaagacggtaataatattcttactcatatattatctatttcctccgcattagaattcgttgtagataaatggctcttggcctgctccataataaccataaaggtagattaataaaagaagcactacaaagtaaaataatgtttttaagatgaattgtaatgcaggatggcgttgaataatctgagccatagttctccttctctcatctttataaatttgtaattgacattcatatcaagaataccattaattatgtatctcggctaatagggtgagttactttcaccttactgtaaagtctttaagaaaaaattaatgaaatgttcagaaataagaatgcttattgccttaaaattataactttttctgagctaattgtaactagaaaaatataaactttatttataattttatatgacatgacaatgatggactaatgtaacaataattgcaagaagtgcttattttcgataagattaagcggtagataatagtgataattaaggagacgaacgctcgatgattaaggggattggaatcgatataaccgagattgaacgagttaagaaagctgcgacagcgcattctcaattcatccagcatgtattgacaccgactgaactagaacaatatagtcaatttagcggtcaacgatcagtagaatatcttgctggtcggtggtcactaaaagaatcttttgctaaagcatatggaacgggaattggtgctaaactaggctttcatgatattgaaatcattgataaccaatatggtgcgccaattgtgattaaatcgccgtataatggtaatgctcatgcttcagtgagtcatactgccgcgttagtaatgacagaagtaattttagaaagtgagaataaataaatggttaatggtcgtttgcgagatacatcattaatagtggacttagatgcattacgtcataatattcaagaacagaaaaaagttttgcccaaaaatagtagaatccttgctgttgtaaaagcaaatgcttatggcaatggattgattccagttgcccaaacagcaatgaccagtggtgcaagtggtttatgcgtagcaattttagacgaagcattggaattgcgggataacggtattgaagccatgacacttgtccttggaattacgccagttgaagatgcgttgattgctgctcaagccggagtttctttaacagtcggctccttagattggcttgaacaatatcatcaactagcacaagttgccaagcctaagaaaccattaaaagttcatctgggaattgattcaggaatgggccggattggttttacagaggtcgctacatttaagcaagctgttaagttgcttgatagtcctgaatttgaatttgaagggatgttcacgcattttgcaactgctgatagtcctgatgaaaattactttaatcaacaggttcaacggtggcatcaatttgttgccagtcttgacgaactgccaccatatgttcatatggcaaattcagcgactggtttatggcatcgggaaaaaatcacggctaatacagttagaatggggatttcaatgtacggacaaaacccatctggacgtgacttgaaattaacgcttgatttacagcccgttagttcattagtttcatcaatttcttttgttaagcagttaaaggcaggaagatctgtcagctatggtgctacttatacagcggagcaagatgaatggctagccactttgccgattggttatgctgacggttatccccggtgtatgactggttataaggtattagttgacggtcaattttgtgatattgccggacgagtatgtatggatcaaatgatgattcggcttcctaagtattacccagtcggcactccagtagtattgatgggcaaatccggtgaccaagaaattacagcaactgatttagctgagcaggccggaactattaactatgaaatcctaactaatattagtaatcgggttcatcgcatttatcaccaaagtaaataattaagggaagcgaaggtaatgacaaaacgaaaagtaaaacggggtgacatctattacgctgacttatccccggtaattggatcggaacaggggggcgttcgtccagtcctgatccttcaaaatgacgtgggaaatcattatagtccaacagtgatcattgctgcgattactgcccaaatgcaaaaaaagaagatgcctactcatgtccaactaaaaggtaagtcgttaccgttaactcatgattcggtcattttattggagcaattacgaacgattgataaacaacgattaaaagaccgaattgctcatttgtcgccagagacaatggcaaaagtggataaagcattaacgattagtgtgggattaagtgctgcctatgatgaaaataaatgagtttgacaatttgcgtcagaactcgtatactcactattgaattaatcacggttcttttaatgtagcccagagagactacaaaagacaaaataatataagcatagtgggcacaaaactatgcttcctcttttgtaaagctctaggaccattaaagggactagagctttttaggtctaaggaggatatcttgtgaaagagcaaaaggggacaacaatttttagtattccaatgaagaacagaaagactaatacttgggatatgtttgccacgtgggtcggtgcaaatgccaataatggaacctggtttgttggcggagtgctcgccgcttgtggattttcggttgccatgaaggtcttagtattgtcatctgccttatcatatgtatttttaagtttggtaggttacattggttataagactggggtatcgacgatgactttaagtcgtgcctcctttggtgaacggggcagttatctcccatcattagttaatattactcaatttattggttggacagcagttaatacttttattgcggcccagtcggtaagcattcttttccatgacttattaggatggcctgtgtggggacaacatggcggctatttagggctagtagtcgggattattatcatgagcattctccatattattagtgtttctagcggatcacgttcagtccaaatgattgagcggttagggataatccttgttcttgtattcgtcatttgggagtcagtagctgtttttcgaaccgtttccttcagtcaaattgtaaattggcatgttcctgcgcaatcaaaaatggcagtcggtgcggcggtcgattatgtagcagcttttaatttagcctgggtaactgccggtgctgatttcacccgctttactgctaaagaaaagaatgcgactttgacgccgttccttggtgctttactaggggttgtatggtttgctttcatcggtctgatttcaacaattagtattgcaatttcaagtggggtatataacgcaaataactctgatccctcaacgattgctagtaagttaggactgggggtagttgcccttcttgttattattttgacctcaatgacggcaaatgctgttaatttattagcggccggatcagctctttcaaatatctttacaaagctcaaattaaagtattcattatggatcgtcgtattgcttgcgacagttgtgacctttattccgatgtttgtcggtagtttcttgagtgcttttgaatcattccttgactatgtggggatggtgttaggacctacgatcgccattatttgtactgatttttatttccgtgctcaccggcaatatgatgttgatgaattaggtaaaattggtggaaaatattggtatcgtggaggcgtcaactgggtagcgattattgtttttgctatcggggttgccttcttcttaggtgttcatcagttaccaatcttcgtaaatacgattggggccacatttattgatatgtgtttgagtggtatcctatattatggaattatgttgctggttgaccgaaaggaagatgaattatgctattaaaaaatgtacatgttgataatcatgaagaagtagtcgatgttcgaattctcaatggaaaatttagtgagattaaggctaacttaacgccccatgacggtgaagaagttattgacggtaaagaaaatttacttttgccaccatttgttgattctcatgttcacttagatgctacgcttactgctggtcagccagaatggaatgaaaccgggactttatttgatggtatccggatttggagtgaacggaaacaagatttaacgaaggaagatgttaaatcgcgcgcgaaaaagacattactgaatatggttggtcatggaattcaacacgtacggagccatgttgatgtaactgatcctcatttaattgccgcccgtgctcttcttgaattgcgtgaagaattaaaagaccagatcgacttgcagttggttgcttttccgcaagaaggtattcttagctatcctcatggacgtgaattaatggagcaggcggttaaagaaggattagatgtcgttggtggtattccccattttgaatttacaactgaatatggttggcaatccgtccatttcttaatggccctcgcagataagtacgatcgtttagttgacgttcactgtgatgaaatcgatgacccagcttcgcgtaaccttgaagttttagcgaccgaagcctatgaacgagggatgaaagaccgggtcactgctagtcatacgacagcgatgggctcatataatgatgcttatacttataagttattccgactattaaagatgagtgatattaactttgtatctaatccattagttaatgttcaccttggcggccgtttcgatacttatccaaagcgtcgtggcgttacccggattaaggaattaacagcagcggggattaatgtttcctttggtgaggatgatatccaagacccgtggaatcctctcggcgatggtaacatgttagatgcagttacgatgggtgtttatattgctcacttgatggggtatcaccaactgcaagatgcctttaattatgtaacttataacggtgctaagacattgcatattagtgataattatggaattgaagtaggaaaaccggcaaactgtatcttattgaatgctcacgacttttataatgcccttaataagcatgttgaagttctttataatattcgtcatgggaaagtccttgctgagacgaaaccagctgaaaccaaagttaatataaaataaaattaaagaaatctcataatagttattgacaagttagggaatggccggtatattatatccagcaattaaatttagattagaaaagcgttgaaggaaataatgatttgaaattggtaacagagaattagcgggtggtgtgagctgatcgagatttctaattgttaatcgttcctgagttaccggctgaaaccaagtaagctgaggttggctgccatccattattttggccacaaatgattgtttgtgaatgagaggatcgactacgagttgatcaaagtaggatggtaccgcgcagaagcgttcttacaattgcgataaagcaatgtaaggacgcttttttctttctaaattttaagaaaatattttgtcttggaggtaattattatgactgaattaaacgcacgacaggaagaatttgctaaggctctttttgaagcttatgacactaatacgccgttaaaagaggaagaatggaaagacgttgtgactgatgatgaaacagcatatgcagttcaagatgcggtagtaaagttaaaagggaagccaactgctggctataaagtttcgttaactagtaaagaaactcaagacatgtttgatgctgattcaccattgtatggacaacaagttgctgaacgattcctccagtcaccggcggatgttgacttgcagatgttaaatgaaccgttattagaggttgaattaaccttccgcgcaaaagaagacttacaacctagtgatacattagaagatttatttcagaaagtaactgttgcgggagccttagaattgcctgatgcccgtttcgtcgattggtttccagatttaggaaaatataatgtaatggctgattgtgctgttggtggtcttgttgtatatggtgaagaacatgatgcagatagcgtatttgaaaatgttgacgatgctgctaatgttcatgccgttttattcaaagatggtaagaaattaaaagaaggggtatcatcagaagttttaggcaatccctttaagtccctccaatggttagtacaaaaattagctgaacaaggaaaagcatttaccaagggtcaaatggtatcatccggaacatttgtcttaccacctaagctcactgctggtaagtgggaagttgagttcgatagcggtttaggaaacgttgtagttaatgcgaaataagcgttgaaagcaggtgggaaaattgggtgagaaatcgccagcagaaattaatattctaaaaattaaaaggggctgggagaaaacttttgttttctctcagcctcaaccgcttttataaacaatagtaagataacgtggaaaataaccacaaggctcgaggctaagtacgaacgataatcagcccgtgccgtgctaatcatcgttctagcttagccaaccgccttgtcgagagggttatttcccactctccttaatatttaatagctttggtgcaagtcttcaatttctgaaacttctaacccttttttctcgagtcgtttaacaatccgttccatcttttctttagtaacatcagcaggcaaggtgtataagacccgtttcattgtttcgtcttctggatcgagtgaaatgacatttacgatctgacaaaaacgagtgatttctttagcagccgttactagcgctccccgttcatcaggagtaataacagttaaaacataactcccattattcacgttccagccagcagctaacatccgtaaaagactattatgggttaaaatcccataaaactgattattgttatccaataccgcaatatatggaaggtctcgaatagcaaagaagatagagaagaaagccgcgttaattgagataaatttagtagcattctttaataatgcagttaccggtaaatgcatatccccctgtcgtgctttatgccggtaaagatgcatcttataaatatttccccgaaagatctttcctgacttatcaagaactgggacacaccgatagccggtatcctccaagacagtcagagcctcatccaatgtcgctgtttctggaagagttgttaaggttgctttgggtttgattaatgaattgaaaatcataattaacatcctttttatcgattaaatgcactcactataataacacatttctatcaaaaggattagaaaaagattagaagatttatgctgttaattcaaattagtatgctgaaaaaagtaacatagggtataatactagttaaaatttatgctggacgggaaaagtgaccgtgcggcttttttgcgtgaaaggaatgaaagaacaatgaaaatgattgttggcttaggaaatattgggacgcggtatgatgaaacccgtcataatactggctttatggtggttgatcaactagcacgagattatcacctgggagcattcacccacctaaaacaagaagcagtcgcagttagtgggataattaatggtgaaaaagtaatgttggtaaagccgacgacgttcatgaatgattcaggacgagcagtcggaccactagtagactattatgatattgacttggataatctcgtaattgttaatgacgacttggatatgccagttggcaaagtacgtttaaaaacacatggggcttcaggcggtcataatggacttaaaagcattatcagcgcgttaggaaccaagaactttaaccgggtaaaagtagggattgaccatccccaacatggaacggtggttagtcatgtcttaggtaaattttctaaagaagaacgtcctaaatttgaccaagcagttgaacaagctgagcatgcattagaagactggattaatggagaagactttgccaaattaatgaatgcttataattaaaatagaaaggtggcgttgatggtgcaaatagaaaatttaatcgagaagacgccatcatttaaacaaattacggctgacctccaacccaagaaccatcaattaataacggggatttctggatcagcgcgaaccgaattactaagtgctctttctaaagaagggcagcgaccaattctagtagtgaccgacacgatttcccatatgcaggaattggctagtgacttggagaaccttcttcctgctaatcgtgtttaccagtttccggttgaagaggttttagcagcggaagtagcaactagttctcctaactatcgtcttcagcgggtactggccttaaatgcgttgattaataaagaaccggcagttgtagttgcatctgctgcggggttacgacgcaatattatttcaccagaatactttgcccagtcctcgttaaagattaagactggcggggaagtggatccagcaaaaattcggcaacaattaagcgcaatggggtatcaatatcaaaaaatggttttgcgtcctggtgattttgcaattcgtgggtcgattattgatatctacgccttaaacactgataatccgattagaattgatctttttgatacagaagttgattcacttcggtattttgatgctagtactcagcggagtattgataatgttgaagaagttcagatactgccagcgacagattttattatcccatcgactgaattttcgcgggtgtatgaagcgctagatactgaatataaaaaggtggggaaggagttaagtgctgacgatgcggatattaaacagcaggtggctaaccgctttgaaccattattgaacgcacttaagaaccagcacttgcctaatgaacttttagaatttagcaacctggtttatccggctaagcattccttatttgattatcttcctgatgatgggacaatttactttgatgacttgacgcggataaagcaatttgccaagcagatgacccaggaagatgcaggctggtttaaagataaggttgctcaccatcaattaacggatgttccagatcttagcaatgacgtatcggccataataaaaaaagacccgcatccgcaaatttatggcgccttatttaaaaaaggtctcggtaatattaaacttagccaaattaccgacctaaaaagcagaaccatgcaacgtttctttggtcaaatgccactgctgaaagccgaacttcagcggtggattgatcaagggcaaacggtagtactgatggctaatagtccagaacggcgaaagcaaattgcccaaacgcttgctgactttgatatcaccgcaacagaaactgaattaacaaatatcaagccgaatgttgttcaaattgttgctgctaacttaaacaatggatttgaaatgccacttgctgggctggttgttattacagaaagcgagatgtttaagcaggtaaaaaaggttcatcatcgtccacaaaaacttgccaacgccgaacgattaaaaaattatactgaccttaaaccaggtgactatgtagttcatgtcaatcatggaattgggatttttagtggaattaagacgatggaagttgaccatgttcaccaagactacatgatcatcaattaccgagataacgctcagatatatgtgccagtaacccaactaaatcttgtccaaaagtatgtatcatcagaatctaagaccccgcatatcaacaagcttggcggtaacgaatgggcaaagactaagcggcgcgtttcttcaaaaattgaagatatcgctgatgaattagttgacttatatgctaagcgagaagcggagaagggatatgcttttccgaaagacgattatctccaaaaacaatttgatgctaattttccatataatgagactcgtgatcagttgcggagtattgatgaaattaaagaggatatggaaaaaccaaagccgatggatcgactgttggtaggggatgtcggctatggtaaaactgaagttgcaatgcgggcaatttttaaagcagtcactggaggaaagcaggtggccttccttgtgccaacaactgttcttgcccagcaacactacaacaccctgatgcgccggtttgagggcttcccaatcaacattgccttgatgtcacgtttcaagacgccaaaagagctaaaagagacagaagcagggctaaaggatggaagcgtcgatgttgttgttggaacccaccgaatcctatcaaaggatgttgaatttaaggaccttgggctgttaattgttgatgaggaacagcgctttggggtaaaacataaagaaaaactaaaacaattaaaaaataatgttgatgttttaaccttgacagcaaccccgatcccccggacattacacatgtcaatgctgggcgtacgagatttatcagtccttgaaacaccgccagctggtcgttacccaatccaaacctatgtaatggagcaaaatagtagtgcgattcgcgatgggatcattcgtgaaatgcaacgcggcggacaggtttattaccttcacaatcgcgttcatgacattgaagagacagtggcgtggttacaagaccttgttcctgaagcccggattggctatattaatggtcagatgagtgaaaatgaactggagacagtcctctatgagtttattcaaggaaattatgatgtattagtgactacctctattatcgaaacgggggttgatatcccaaatgctaatacgctctttgttgaaaatgctgatcggatggggttagctcagctatatcagattcgcggacgaattggtcgtagtaatcgggtggcttatgcttactttatgtatcagcctaataaggtcctaacagaattaggagaaaagcggctagctgcaattcgtgattttaccgagttgggatctggatttaagattgcaatgcgagaccttgctattcggggagctggtaacctcttggggaaacaacaacatggatttatcgattctgttggttatgacctatattcagcgatgcttagtgatgcggtagctaaaaagcagggtaagaagcaaactattcactccgatgcagaagttgagttaggggttgaagcttacctaccaacggattatattgcagaccaacggcaaaagatcgaattatataagacaattcgccaagctaagacagatgaagaagttattgatattcaaggtgacttgattgatcggtttggcgattacccggcaccggttgggacgctgttgcttgtcagtcaattgaagaatcatgctgacctggcaatgattgctgagattaagcggcaacgtgataatattaatatcaagtttactgaacgtgctagccgcttgattaaagcccctgcaataattaaggagctagctaatacgcgatttaaagcaacaatcggtgaagacaatcagcaactaacgattcggctggttattcaacctaaaatgactactgatgattggcttcaccagctactacaatttgtaacgactttaggaaacgttattcaagccgatgaaaaaggagcggaaaaatgagattagataaatttttaaaagtatcacggattattaaacgtcgatcaattgctaaggaaatcgcggatcaaggacggatcttaattaatggtcaaccagcaaaatcatccagtcgggtagcggttggtgatactttaacaattaagtttggtaataagacagaaacagttaagattaatcggattgttgaaacgacgaaaaagagtgaagcggaagatatgtatgaaattgttgatgaaacttacgcggaatcctttgaccaactataatatcttctgagatataaaaaagttgataatcatatggacattctccgcggtatcttgctatacttaaagcgtgataagttaaaatggaggggaatgtcagatgaaaggacaatctgatagcaaagtttcacaattaaataccccatatgcccgccaggtttcgaatcaaaaaacatataatcggcatgtgcataagcgccgttgtcagcggattattgccgtttttttggttatattcttaatctttggaattcagatatttcaaagcaaacggacattagcagatattaatggcaatattcgacaagcacaatcacaattaacaaaacaaaaacaaaagaatcaacaactacaacgtcagattaaaatgttgcataatcccgaatatattcagcaggttatccgtgctaagtataattactctaagaagggcgagataatctataatttgaactaatgatcacaaaataggatgtttttagtagggttagaatattttaaatgttaaaattgagaatgtaattgggtgatttttcagcttagttttttatgagaagtttagttattttcatacgttttcaagatgaagttatgatatactcaaatacaaaaatatgagatggttcaggaggatctataggtttcatggcaattgaagttggagcaaaggtttcaggtaaagtttcaggaatcactaattttggtgcattcgttgatttagatgataatcagacagggctagtacacatcagtcaaatctctgataaatatatcaaggatgttcatgatgtattggctgtcggggatgaagttacagcaaaagtaacacggattggtgatgacggtaagattgctctttcaatcaaggctgcagctcctcgtgaacatcaagatcatcatgaaaataaccatcatcgtgaaaataatcaccgtgattttcaccacgaacggaataataatttccgtggtcacaatgataacttccgtggtggttttagtggtcgtcaccacaacagtcaccaacacgaagactttaatgacatgttagctggctatttaaaagaaagcgaatcacgtttatctactttgaaacgtcaaactgatggtaagcgtggcggccgtggtggtcggcggagctaatatggcggatttacaacaagcatttgagcgacacctagtaaggagtcgcttttttgctacccaagataaggtggtagtggctgtctcaaccggagtcgattcgatggttctgttagatctcttgcaacatttgccgttaaaatatcgtccccagattatcgttgcccatatgaaccatgagttacgaaaacaaagccagcttgaagaacggttcattcggcagtattgtaaacaaaatgatttaaaactagcagttgcacactggccacaagatcttcatccacagaccggggtcgaaaacgctgcccgtcaagcacgctaccaatttttccgggaagtgatgaaagataatcaggcaagcattctgctaactgcacaccaccaaaatgatctagcagaaacaatgctgatgaagatggctcgtggtggtcagttgagtcaattagtgggaatacgagatcggcgaccatttgcttctggaaccttaattcggccgcttttaccctttagtaaacagcagttaaagaaatatgctttgcagcatcatcttaagtggtatgaggataagacaaataaggacttgaacattcaacggaatcgatttcggcatgcgataattccaatgcttgaagaagagaatcctcagttgctttctcacctcgaaagctatcatcaacagttaacggatctccttgcctggcgtgatcaagaagtggcagatcaattagcagcatgtgttgatcaacaaggaaggatgatcctggcaagattattgcaaaataaggaaatcattcgaaaagaaattttacgacaatggtttaatcaacaaggaatatatgatattaaggaccagcaacttgatgaactgctgcagatcctagaaaacgagcaaaagccacagcaaatcattgagttgccgcatcgatatattcttgagaaagcctacgctacttgtgtgttaaaaaaattggataatccgcttgagaacctacaaaagccccaagatcatgtgataaaattggaacaatggtatcaagtagatccaataaacttaatggcagtgtcagctgaaaagtcgtttttcaatgatgaagagcaggtagttttgcaatggcttgctccagatcaatttccgctgcgtctacgacaatggcgacaaaaagatcgtattcgcttaaaaaatggtcatcaccagttagtcaagcgggtcctaattgaccaaaaagtttcccgaaaacagcgtgaccagcaaatggtcctagttgatgcgcatgacgaggtcgtctggatagttaaccgaaagtggagttggtttgaacggccaaccggctatcagcagacatgtcggtcatgttttattggaataaaaaataaggagaagaaggtaaatgaataacgatattgagcgtgtcttatacagcgaagaaatgcttggcaaacgaatggacgaattagcaacggacttaacaaaagattataaggataaacggccaattatcatttccgttctaagcggagcagttttatttactgttgatatgattgaacggctagatatcatggcccaaatcgactttattgatgtttctagttattttggtggcttaggttcgactggaaaagttaaacttattcatgatttgaaaacagatgttaaagatcggcatgttctaattatggaagatattgttgataccggtcatactttgaagtacttgatggaccttttagccgaccggggagcaaagagcataaaggtttgttcattattaaataagccagaaggtcgggaagtagatgtcgaacctgattatgttggttttacggttcctaaagagttcttggtagggtatggccttgattacaaaggattctaccgaaatttaccgtatgttggaattttgaagccatctgtataccaaaatgactaaaaatgttagataattaggatgacggaaaaatcaatattaaatggacggtattttaaagatattcttaattaacgtccatttttatggatccgtaaatatgtagtatgtattattaataacattggcgataaaactattaattcttctgtaaaattaatggtcaatatttgtcaaatatgctatgataatgactacaattataaaatatcgttgctggtagataggaggttgttatgaacaacaatcgtaaaaaaaataattttactcataacgttctcttctatgccgtgatgttcttgtgtattatgggaatcgcctacttcttctttgggggcaatgcctcaacaggacaaagtaagacagtttcccaaagcgagtttatctccgaactgaagagtaataaggttaagagcgttcagcttcagccaaatggtggggtatataaggttacgggtacttaccgtaaacctcagtcaaacaatgacaattccgccaacaatactggctttgctcttacaccacaacgaaacaataaggtaactcaattccaaagttctgttttggaaagtgacgtaactgttagtcaacttcaaaactatgctaaccgtcataatgtaaagattagtactcgtgctgaagaatctaatagtgtctggatgaacctgttgttgactgtcttgccattggtcatcatgattttcttcttctacatgatgatgggccaagctggtcaaggtgggggtggccgtggagtgatgagctttggtaagaccaaggccaagccatctgatgctaagaaaaacaaagttcgtttctcagatgttgccggtgaagaagaagagaaacaagaattggttgaaatcgttgaattcttgaagaatccaaagaaattcactaagcttggtgctcgtattccatctggtgttttactggaggggcctccaggtactggtaagaccttgctagctaaggcggttgccggtgaatcaggggtaccattcttctcaatctctggttctgactttgttgaaatgttcgtcggtgttggtgctagtcgtgttcgtgacttatttgatcaagccaagaaagctgctccagcaatcatctttattgatgaaattgatgccgttggtcggcgccgtggaaatggcatgggcggcggtcacgatgaacgtgaacaaaccttgaaccaattgttagttgaaatggatggtttccaaggcgatgaaggaatcatcgtcatggcagctactaaccgttcagatgtcttggatcccgcccttttacgtccaggacgttttgaccgaaagattttagtaggtcgtccagatgttaagggtcgtgaagccattttacgagttcatgctaagaacaaaccaatggcaagcgacgttgatttaaaggaaattgctaaacagactcccggttttgttggggctgacttagctaacctattaaacgaagcggccttattagctgcgcggcggaacaaaactgaaattgatgctgctgacttagatgaagcagaagaccgggtaattgctggaccagctaagcataaccgtgtccaatctgaacaagaacgaaagactgttgcataccacgaagcgggtcacacgattgtgggtcttgtattaaatgacgcacgagttgtgcacaaggttaccattgtcccacgtggtcgcgcgggtggatatgctatcatgcttccacgtgaagatcagatgttaatgtcgaaaaagaatgcgatggaacaaatcgctggtctgatgggtggacgagctgctgaagagcttgtctttaagtcacaatcttcaggagcttcaaatgactttgaacaagcaacccaaattgctcgttcgatggttacccagtacggaatgagtgataagattggtccggtagaactgcaaagttctggtcaggtctttacaggtcaaggctatgaccaatcaccttactccgaaaagactgctgctttagttgatgaagaagtacgtcgaatcttaactgaagggcacgaaaccgccttacacattattgagacgcaccgtgaacaacataagcaaatcgctgaagcattactcaaatacgaaacgcttgatgaaaaacaaattcttagcctttataagactggaaaagttcctgataaggatgtggctgctgaagacgaagaggcacgtgcacaaacctttgaagaatccaagcgtgaacttgaacgattggaaaatgagcgtcacgatgaagcaaaggataatcaaaatgattcatccgatactaagagtgacaactcaaatgattcacaatcaagtgatgattcagacaattctgaagacaagtaaactattgaaaagacggaagatacaaaacctgattggtaggtggtgatcttccgttttttctttaggattaattttaaggagaaatttaaaatgaaaacaacagattatttagtaaagtcaatgactaaggatggaaagtttcgggcttatgctgtaaatgctacccaagtcgttcaaaaggcacacgaaattcatgatacatggagtgcttcttcggctgcccttggtcgaacgttaattggaacgattctcttggctacttctagtttacaaggagaagcaggaatgacggttaagattcagggaaatggtccagttggctttattattgcggatggaactgctgaaggaaccgtaaaaggctacatgggtaatccacacgtttctttaccagccaatgataaggggaagatcgatgtcgcaaaggcaattggtaatcaaggaactctttctgtaaccaagatggctcctggcgacaagacaccatataccggcgaagtaaatttagtttctggtgaacttggtgatgactttacttactaccttgctcaatctgaacaaattccttcagcagttggcctttcagtattcgttaaccctgatgaaaatattgacgttgctggtggcttcatgattcaagtaatgcctggtgctagcgatgaagaaatcagcaagcttgaaaagacattgaagagcttgccattggtatcacaaatgttacgtgatggtgatacgccagaagatattttaaagaaaatttttggtgatgacttaaagatccttgaaacgatgccggttcgttatgcatgtgattgctcgaaggagcgttttgcacatgcccttgcaagtatttctaaagatgatatgaagaaattgattgacgaagaccaccatgcggaagctgtttgccaattctgcgggaagaagtacgaatttagcgaagacgaattaaagaagatctacgcggaaatgactgcaaatgatgataaaaaatcaacagatgaaaagtaatttttggtgctaagcgtgttgatatgctatgatagttgagttatcggacaattaaaaatgaaactggatggccagcacagtttcttaagcagtaatgaggtgaaaaaatgaaatggaagatcggtaacgttgaaattcctaatcaagttgttgttgcaccaatggctggagtaaccaattcagcctttcgggttatctgtaaaagatttggtgctggctacgttgtctgtgaaatgatctcagaccgtggcattgtgtatcataatcaacgaactttaaatatgatggatgtcgacccggaagaacatccaatgggaattcaaatttttggcggaaccaaagagacattagttgaggctgctaagtatgtagatcaacatacagcagctgacgtgattgatataaatatggggtgtcctgttaataaggttgtaaaaactgacgcgggtgcacggtggttactggatcctaataaagtctatgaaatggtgtcatatgttactgatgctgttaagaagccagttaccgttaagatgcgaactggttgggacgacaagcatattttagctgttgaaaatgctttggcagctgaacgtgcaggagctagcgcgattgcgatgcatggtcgaactcgaaaacaaatgtatacgggacaagcagattggaatatactaaaagaagtagcgagtcaattgaaaattccgttcatggctaatggtgatgtgaagacaccagaagatgctaagaagattcttgatatgactggcgcaaccgccgcaatgatcggtcgggcagcaatgggtaacccatggatgctaaagcggactgaacattacttagagactggtgagctgctcccggaagcaaccccagaacaaaagattgaaatggccaaagatcatcttaatcgtttagttgatttaaagggtgaatatgttggagttcgtgagttccgtgggttatccacgtactatatcaagggtattccgcgtgctgcccggactaaggtagcgttagtcgaggcagaaacacttgatgaaatgaacgatatttttgaccgctttgctgaacaaactgcagaacgagctgcaaaaagacagcaagcttaattacgaggaggagaacttaagtgtcacaagaactagatcaaatgcgcgttcggcgtgaaaaaatggaagagttaaaagaagcggggattgaaccgtttggccgtcgcttcaaacgagaccatcttgcccaagacttgcatgataagtttgatcaatacgataaagaagaattaaacgagatgggcgccaaagtaattattgcgggtcgaatgacaagaaagcggagtagtggtaaggctggtttcgctgactttgttgatcggactggtaagattcaagtttacgctcgtaaggatatggtcggggatgagccttaccatgttttcaagcggtcagatattggtgacttccttggaattgaaggggatgttatcaagacggatacaggtgaattaactgttcgtgcacataaaattaccttcttgtcaaaagcattgcgtccacttcctaataagtgggatggggttactgatcctgaaactatctatcgtcagcgctaccttgatttaatttctaacccagaaagtttcaagcgtttccaccaacggacagcgatcatcaaggccgtccggaagtacatggatgataatggctttacagaggtagaaaccccaattttgaacactcaagctggtggtgctaatgcgcgtccatttatcactcaccacaatgcgcttgatattgatatgtacttgcggattgctaccgaattgtaccttaaacggttaatcgttggtggctttgaacgggtatacgaattgggccggattttccggaatgaagggatggaccctcaccataaccctgaatttactacaatggaaacttatgctgcttactttgacttccaagatgttatggatgaaacagaaggaatcgttaaggcagcagctaaagttgtttcagatgatggaaagattacttaccaaggacatgaaatcgaccttggagggaactttaaacggatcacgatggtggatgccgttaaggaaaagactggcattgacttcagcgatgaatcaatgacggacgaagatgctaagaagttagccgatgaacacaaggtcgaatataagccttactggacaaaggggcatatcttgaacgcattctttgaagagtttgttgaagatacacttattcaaccaacttttgtctatgaattcccagttgaagtttcaccattagcaaagcggaatgctgataatcctgcgatgactgaccgtttcgaattgtatgttgacggtagcgaattggcaaatgcctttagtgaattaaacgatccaattgaccagaaggaacgttttgaaatgcaagcaaaggaaaaagctaacggtaatgatgaagctgaaccagtcgacttagattacgttcaagccctcgaatacggaatgccacctactgggggacttggtattggaatcgatcgtcttgtaatgctccttactgatgctaaatctattcgggatgttattctcttcccaacgatgcgtccggaaaaggaaactaagaacgattcaaagaaaaagaagaacaagaagaagtaagctgaatggttgatgaaaaattagcataaatagataactcgtattccatttttatggggtgcgagtttttctgttttagttatgttagaataactatcaatttagaggagaaatgaggggaattgatgggagaattagaaaagttaaagcaagactgtatagtaaaacaaaagcgtgggttgcatataataattgcttcgatcgtagtatggggcggtattcttgcagtagaactacttaatgttcccgttcttactaaaaacttattcgtatttgtctgtacggccttacttttaccaatatcttatttcatatcgcgattaattaatgtggattttcaaaataagacaaatccgttaactaagttggggatgttattttcgatgaatcagcttttgtatcttctaattgcaatgtggatttatccgactattcccaataaaatgctaatggtgttagcgataatatttggtgctcatttactgccatatagttggttgtataattctagggcttattttatttcatcgatagtaatttcaatattagctttattggtgggaactaattttaaaccgtttattttagcatcagttatgcttaccatagtagtagcattttgcattaccttaatattagaaaatcatcaacttgactgaagggctccgatccgtaaagaagatcgaagccttttttactatattattttaattcttgtgaaacttctaatagtagaaaaaacaattgcaaaaagagactaatagttatcaaggaatgttcctaacaatctatccaagaagatataaaaattgaattggtccggctattcagctactgatttaatggctgaataataatttccagcgttaagataaaaattgaatgggtaaatatatcgagttactaaccgagtttaatattgatgcttttctccatactaattaggtgattttcgggatggaaaagaaatgctaattggtaagaatggtaaaggaggcaggcaaacttattaaaggaatagtgagtttaagaagctaatagatagcgatgaaaataaaattcaaaaaagttgaaaaaaggtgttgacgaaagaatgaaatccatgtatagtagttatcgttgtcaaaacagctaagtgctgttgagatggtttaacaaaaaagttaaaataattgttgacatcgacttggcaacatgatatattaataaagttgctgattgagttatcgatcaaaagaaattaaaaaataatttaaaatttcttcttgacaagttaatccgatgcatgatataattaaattattgattggctgcttaattagccgacaggtagacctttgaaaactgaacaaagtttcgacgaatcaaatgtgtagggtcttcaatcacgatgtgatttgaagcaaaacatttgcgaagtcaattcgcttaataacaaagataattgagagctattcaagttcttatatattttatatgagagtttgatcctggctcaggatgaacgccggcggtgtgcctaatacatgcaagtcgtacgcactggcccaactgattgatggtgcttgcacctgattgacgatggatcaccagtgagtggcggacgggtgagtaacacgtaggtaacctgccccggagcggggataacatttggaaacagatgctaataccgcataataacaaaagccacatggcttttgtttaaaagatggctttggctatcactctgggatggacctgcggtgcattagctagttggtaaggtaacggcttaccaaggcgatgatgcatagccgagttgagagactgatcggccacaatggaactgagacacggtccatactcctacgggaggcagcagtagggaatcttccacaatgggcgcaagcctgatggagcaacaccgcgtgagtgaagaagggtttcggctcgtaaagctctgttgttggagaagaacgtgcgtgagagtaactgttcacgcagtgacggtatccaaccagaaagtcacggctaactacgtgccagcagccgcggtaatacgtaggtggcaagcgttatccggatttattgggcgtaaagcgagcgcaggcggttgcttaggtctgatgtgaaagccttcggcttaaccgaagaagtgcatcggaaaccgggcaacttgagtgcagaagaggacagtggaactccatgtgtagcggtggaatgcgtagatatatggaagaacaccagtggcgaaggcggctgtctggtctgcaactgacgctgaggctcgaaagcatgggtagcgaacaggattagataccctggtagtccatgccgtaaacgatgagtgctaggtgttggagggtttccgcccttcagtgccggagctaacgcattaagcactccgcctggggagtacgaccgcaaggttgaaactcaaaggaattgacgggggcccgcacaagcggtggagcatgtggtttaattcgaagctacgcgaagaaccttaccaggtcttgacatcttgcgctaaccttagagataaggcgttcccttcggggacgcaatgacaggtggtgcatggtcgtcgtcagctcgtgtcgtgagatgttgggttaagtcccgcaacgagcgcaacccttgttactagttgccagcattaagttgggcactctagtgagactgccggtgacaaaccggaggaaggtggggacgacgtcagatcatcatgccccttatgacctgggctacacacgtgctacaatggacggtacaacgagtcgcaagctcgcgagagtaagctaatctcttaaagccgttctcagttcggactgtaggctgcaactcgcctacacgaagtcggaatcgctagtaatcgcggatcagcatgccgcggtgaatacgttcccgggccttgtacacaccgcccgtcacaccatggaagtttgtaacgcccaaagtcggtggcctaacctttatggagggagccgcctaaggcgggacagatgactggggtgaagtcgtaacaaggtagccgtaggagaacctgcggctggatcacctcctttctaaggaataaaacggaacctacacatcgaagaaactttgtttagttttgaggggtttaccctcagagcttgtactttgaaaactaaatactatctaatttctttattaacaaaacaataaaccgagaacaccgcgttatttgagttttaattaacgaattataatcgctaactcaattaatcagacaatctttgattgtttaggttaagttatgaagggcgcatggtgaatgccttggtactaggagccgatgaaggacgggactaacaccgatatgcttcggggagcggtaagtacgctttgatccggagatttccgaatggggcaacccaatcagcttagtcgctgattacttgactagtgaatacatagctagtaagaggtagacgcagtgaactgaaacatcttagtagctgcaggaagagaaagaaacatcgattccctgagtagcggcgagcgaaaagggaagagcccaaaccaacaagcttgcttgttggggttgtaggactgaacattagagttaccaaagtgcgacgtagtcgcaacagttgggaagctgtgccatagagggtgaaagccccgtagacgaaacgtcacactctctgttcaggatcctgagtacggcgggacacgtgaaaccccgtcggaacccgcgaggaccatctcgcaaggctaaatactccctagtgaccgatagtgaaccagtaccgtgagggaaaggtgaaaagcaccccggaaggggagtgaaatagttcctgaaaccatgtgcctacaagctgtcggagcccgttaatgggtgacggcgtgcctcttgcagaatgaaccggcgagttacgattacatgcaaggttaaggtggaaaaaccggagccgtagcgaaagcgagtcttaaatgggcgtaaaaagtatgtagttgtagacccgaaaccaggtgacctacccatgtccaggttgaaggtgcggtaaagcgcactggaggaccgaacccgtgtcagttgaaaatggctgggatgaggtgtgggtagcggtgaaattccaaacgaacttggagatagctggttctctccgaaatctctttaggggagccttgaggtaaagaatcgtggaggtagagctactgtttggacaaggggcccgtcatgggttaccaacttcagataaactccgaatgccatcgatttatactcaggagtcagacgatgagtgataagatccaccgtcgaaaggggaacagcccagatcaccagttaaggtccctaaatatatgctaagtggaaaaggatgtggagttgcatagacaactaggatgttggcttagaagcagccaccatttaaagagtgcgtaatagctcactagtcgagtgatcctgcgccgaaaatgtaccggggctaagcatattaccgaaactgtggatgtgcactatgtgcacgtgataggagagcgttctaagggcggcgaagtcagaccgtgaggactggtggagcgcttagaagtgagaatgccggtatgagtagcgaaagacaggtgagaatcctgtccaccgaatgactaaggtttcctggggaaggctcgtcctcccagggtaagtcgggacctaagccgaggccgagaggcgtaggcgatgggtaacaggttgagattcctgtaccagttaactgcgtttgacgatggagggacgcaggaggctaagcaaaccgtacgactggaagagtacggccaagcagtaagtcaggatgtgagtcaaatgtttacatccgtgttgacaagctgtgatggggagcgaaattaaagtagcgaagttgccgatgtcacactgccgagaaaagcttctaaggagtagttaactgcccgtaccgcaaaccgacacaggtagtcgaggagagaatcctaaggtgagcgagagaactctcgttaaggaactcggcaaaatgaccccgtaacttcgggagaaggggtgctggccgcaaggccagccgcagtgaataggcccaggcgactgtttatcaaaaacacaggtttctgcaaaatcgtaagatgaagtataggggctgacgcctgcccggtgctggaaggttaaaaggatgggttagcttcggcgaagctcagaattgaagccccagtaaacggcggccgtaactataacggtcctaaggtagcgaaattccttgtcgggtaagttccgacccgcacgaaaggcgtaacgatctgggcgctgtctcaacgagagactcggtgaaattgaaatccctgtgaagatgcagggtacccgcgacaggacggaaagaccccatggagctttactgtagcttgatattgagtgtttgtactgcttgtacaggataggtaggagccgtagaagtcgggacgctagtttcgacagaggcgctggtgggatactacccttgcaatatgaccactctaacccgcagcactgaacgtgctgggagacagtgtcaggtgggcagtttgactggggcggtcgcctcctaaaaggtaacggaggcgcccaaaggttcgctcagtatggttggaaatcatgcgcagagtgtaaaggcacaagcgagcttgactgcgagacagacaggtcgagcagggacgaaagtcgggcttagtgatccggtggttccgtatggaagggccatcgctcaacggataaaagctaccctggggataacaggcttatctcccccaagagtccacatcgacggggaggtttggcacctcgatgtcggctcatcgcatcctggggctgtagtcggtcccaagggttgggctgttcgcccattaaagcggtacgcgagctgggttcagaacgtcgtgagacagttcggtccctatccgtcgcgggcgtaggaaatttgagaggacctgtccttagtacgagaggaccgggatggacataccgctggtgtaccagttgttccgccaggagcaccgctgggtagctatgtatggacgagataaacgctgaaagcatctaagtgtgaaactcgcctcgagatgagatttcccatttccttcgggaaagtaagacccctcagagatgatgaggtagataggatggaagtggaagtgccgtgaggcatggagcggaccattactaatcggtcgaggacttaaccaaggagcggtaaggtttattggaagagaatagataggatttagttttgagagcacaagctctcgtccgaagggacaaagagtgtggtgatgatggcttgaaggatacacctgttcccatgccgaacacagaagttaagcttcaacacgccgaaagtagttgggggatcgctccctgcgaggataggacgttgccatgcgttattccggcatagctcagttggtagagcacctgactgttaatcaggttgtcgtcagttcgagtctgactgccggagtcgatgaagatgttgactaccttcggttagttaacatctttttttgccaacttagctcagctggtagagcatctccctcgtaaagagaaggtcggaggttcgactcctctagttggcattatgaaaggtttataaccaattagaagtctacagattaagccgataaagcttattatgtaggcttttttgtatacttaagaagttaagtgaattgttcgtaagcagtcaataacagtacgtctagctctagctaccccggatcttctatactgagactatcatcagtaaggagattttttatttatgacagaacaaaatgaaattattaccccagttttcaaaaacaagccaagtaatttacaaaagcattcttttacggcacgccctgccgtaaaaattaatgtgaatgaagtcgaattaacgattttcaaggggactaattctgttttagcttcggatatcgttaaagtggttattcgttatgctcgttaattggcatgacccagattatatctatttagtctgtggaaaaacagacatgcgaaaaggtattgatgggctcgcaatggtaatcgctgagaactatggattagaattatataataattcgcttttcttattttgcggcggacgtaatgatcgctttaaaggattgttttgggatggcgagggctttattatgctctataaacggtttgaaaatggccaccttagttggccgagaaacagtaatgaagccaaagaattatctgctcaacagctcgactggttattgcaaggactgaacccattaccaattcgtaaaattcaagctgttcgaccaggaagtttttattgagttacctctatttaaaagaagaattctttgatataattaccaaagaataattcaaaggaggtgacgtaccatgaagcaaacagcggaagaacaaatcaaagaacttaaacaacaattagctatggccaatgaaaagattgctcaattaacagctattatcaaacttcaaaagaaccaaatatttgggaaaaaaactgaagtaatggagcccatcgttgatggacaacaatccttatttagtgagcaagaaatggatcaacttcaagatcctgatatttcagtcacggaagtgactgaaaagaaaataaagcaagtggtgcgtcaccggaaagcaaaacaatctggtcagcggaccacttttttagatggtttaccacaggttgaagaagttattccattaaaagatactaactgcccacactgtcatcaactaatgaaaaaagtgggtcaacatgtatatagtagagaagcacggttaaaaccggctgaattatattgtgtgaatttgattcaagaaacttataaatgtaatgagtgtattaattctaatggtagcgatgtacttgtcagtagtaagatgccacagagtcttttaccccatagttacttttcgagtactattttagctaaagtagcagagttgaagtttaatcttgctttaccgtttcatcgtcaaattaagttttggcaagtcgtcggcttacgagttgatgctcgattattggcgactaacatcattaaggttagtcaaacctaccttgaaccgttatatgattatttacaggaattaatcagaaaagaatcggtaattcatatggatgaaactccattcaaggtaattgatgagcctaatgaaactggctacttttgggtaacgcgatcaacaaaagaattcagtaagcatcaaattatcatgtttcattactataatacccgcgcgggtaaaaccattggtcaaattatcggtcatcaatatcgtggaattattatgtgtgacggttatggtggatatagtgatcgattatatccccaggcaaaatttgggtcatgtttagttcatattcgacgtgaattttatcacattacatgtttattgaataaggagcaattgaagaactccaaagcataccgagttttacagctaatgcgaccgatctttcatgaagagaaacaattaacatattccaatcataaggaaaaactagtgtaacgtcggttgcacgtgaagcctttgatggataagttatatacttatttagaaaatatcagttttcctcaaggacggttgaaagctgccattaataatgctttgaagctaagaaagcgagtatatcaaatatttgaagatggtcgagtgccgttaacgaataatccggttgaacaagcgattcgtccatcaactcttattcgaaagaatagcttatttgcgaaaagctctgctggagctcagtcaaataccattttctatactttggtggcaactgcaaaccagaaccatttaaatatctacaaatactttaagtatctttttgatcacttaccaaaccgcaaggacgcaggactttaggcttatttgccatggtcaaaagaaattcaagcaaaatgccataaataaaacggggtcatgaattaccattttcggtagctcatgatcccaattttttcaatccgtactgttattgactgcttacgatccaccacgctcaaggcgagaaataaaattaattgatagattgcttaactcagcaagttgttgttgggtcatatttaattcatggcgacggttagcaatattttttcctaattgttgttccatagttgattattccttgttttttattttaagggtaatatgattatatactaaagtcgctaaacggatcgaacaaaaagagaatatgatttattgaaacttaatctcagctaaaaatcagtacctaaccttcatgttattacattggttcaacaaaagtaagctgttaaaacttcttatgattaagtagagcagaaaataaacaaactcctacttgaaaatatttctagacaaattttaaattagcttgacgggtataaggatataatatataatgatatccgttgagttattccggcatagctcagttggtagagcacctgactgttaatcaggttgtcgtcagttcgagtctgactgccggagtcgataaagatgttagctgtttggctagcatctttttttataccttctaaacatctttttaatattctaaattgcatatctccagtttttaacgatagattattaatttttatatcaaaaaaattgtagaagttttaacatgagaatatactaaaactgtaactagtttcatatgtagtttaggagaatggaggtatttataatgcgatttagtaaagcaatccttgttgcaacaagcataattgcaattgggctatgtacaagtggctgtagtagttttagcacgagttccaacagtagcaagagcagtaagtctcatcagcaaaaaagaggagtcacatattgtgggctcgtatcgtgatgatgccgatggagctgctattacccttaattcagatggaactgggacatatgtaatggaaaatccgacgcagactgatatattcttgatcaattgacctggaaacaggaaaagaataattacatcattaatttaaatgatagtaattatgatacgccaattgatgcgcggctaaatgaagataatttgagccttgtaggtaacgatgaatggcctaatcagtcatttaaacgagttcatggggactttgacgttgataatttctcaaaagaacaacatgcgaaaactaacagttctacaactaaggatactcattctaaggaatcatcgactcatgcccgcgcagcacttaaaaatgggcgagtgaccaccacaaagacaccagcaagattgataatttgaaggctacgactgacctatctgagccagatgaaggttgggcctgatgataatggaactgaatgtgccattgttcgaaatggaaaagtttacccacgtccggttattgatggtgatacgtcatctaattaataatcttagcgacaaacttaataaaataaacaattatagctcatacatgcgtttgcgttctcatcaaaaacttatttttcaattgacgatgttttgaaacacgtttataatagtactattctgaattttattgttaaagttttttaatgtttagaatacgtattcaattaacattgtgctaattgaaaagtgaaattatttggaggaattgtatgagtaaacaaaagaatttggatacctccttctttggacaaccgcgtggattgtcgacattgttcttcactgaaatgtgggaacggtttagttactacggaatgcgggctatccttctattctatatgtactacgctgttaccaagggtggtttgggtatggaccaagctaccgcagcatcaattatgtcaatttatggttcattagtttacctggccagtgttgtcgggggatggttatctgaccgtgtatggggatcgcgtcgaacggtcttcatcggtggtgtccttattatgtttggacatatcgctctgtcattaccatttggtgtgtcagcactttatgtatcaatcgctttgattgttattggtaccgggttattgaagccaaatgtttcagaaatggttgggggcttatatagtcctgaagatcgtcgtcgagactctggttttagtatgttcgttttcgggattaacttaggggccgctgttgctccttgggctgtcccttgggctgctaatggctttggcttaaaccttttccatggtgaaatgaacttccacgctggtttctcactagctgctatcggaatgttctttgggttagtacaatatgtagttgacggccggaagtatctttcaaaagatagcttatatcctgatgatccgatcgataaggaaagtttacgtccagtaattatttggtcaattgttggtgttattgcattagtgatcattcttggattgcttgcggcaatgggtcaattaaacatcaataatatcattacaatcattacggttattgctattgctttaccaatctactactttgtaatgatgttgaattccaagaaggttacaaaggatgaaaagtcacgggttgttgcttacattccacttttcattgctgctgctatcttctgggcaattgaagaatcaggttcagttgttttagccctcttcgctgaacaacggactattttacacattggtggctggcactttgctgctgctaacttccagacattgaacccattattcattatgatcctaacaccatttttcgttgcactttgggatcactggaaaaaacaaccaagtgctcctggtaagtttgctgctgggttagtaattgcaggtctttcatatgtttggatggcacttccagcaatgattcacggtacaactgctggacgggttagcccattctggttagttggttcatggttcattgttgaaatcgccgaaatgttaatttcaccaattggtctttcagtaactactaaacttgcaccaaaagcatttaagtctcaaatgatgagtatgtggttcttggcggatgctgctggacaagcggttaacgcccaggttgttaagtactactcatcagctacagaagttccatacttcttaattatcggggcagtaagtatcgtcttcggattgatcctttgcttattcgttaagaagattcatggcttaatggatggtgtagactaaaaattatattaagagatcgagaataattcttggtctctttttttatgaggtgagttatgaaaatcgcagtaagcagtgaccttcatttagatttaaatcatgctgatgttgcagaaattattactcaacaggcgcattatttaacccgtcaagaaattgaccattacttttttgtgggggatgcctttaatgattttgcgcaaaccagcgtatattttgcggaactacaatcgcaattgcctatcacaaaggtccattatcttgccggtaaccacgatatgttagaaggagtcacttatgagcaattagaaaatttggatgatgatctatattttcataaccgatttatcgatattccccaaacaaactggcggattatcggtaacaatggttggtatgattattcgttttcaacgtatgaaagtaatgtaaaaggggtcgcaaaatggaagcgggcatattgggtggatcgtccaattatgcagccaatgaatgatccagaacgaatggcgattgttttacaccaagttgaagaaaacctaaaacaggctcgcaatcaacaaaaacaggttatctttatgacccacttcgcaccgattagagaagctctcccgcatccaattattgagtcagcacggcggcagcggatgtgggagatgacgacagcaatgttgggtagtagacacttaggagcattactcgctaaattcccggaagtaaaagcagttttctatgggcatcttcattatgctcaatcattaattactgttggaaatattgaataccgtaatcaagcagttggcgtaagacgcaaaaatagtgagaactggaaggggaaaagcctattagatcaatggattagctgcctttatactaaaaaaatctagttttttcaaaaaaataagaaaaaatacttgcaatgaggttggaaattaggtattataataaacgttgattgatacgaaatatttaatcaagcaacttcttggaggagtagcgaagtctggttaaacgcgacggtctgtaaaaccgttccttcgggttcggcggttcgaatccaccctcctccatctttattattgggctatagccaagcggtaaggcaacggtttttggtaccgtcatgcgctggttcgaatccagctagcccaactgttattgaaaggctaagaaaaacatctgtttttcttagccttttctagttcaaaattttattaagctatatgaaaaaaggaatgacagccaatgcctaaacaaggtcattttgcaaaaagcatgcgaactaaacaaataaatgattttaaagtgaaacgcaatgcgactggtgcgaccattgatgatgaacagttaacagatttcctagtggttcgctttgctttaacagctaagaagagggttcaatctggggctcgagaaactgctcaacggttcttgattgaaatttgtgattctttacaagaaaatgatggggatttacaggcgatcattccaaatttactagtgagtcttaatgcccgggtaccttggcaattctatccaaaaattctgggagagtgggatttgcttcaaaagtttttacaaaaagaacttcctgcagttccgttagaaaaacgtctacgaattaagcacccagtcacaacccaggaaatggagacgttaattgcaaaattattggtcagaaagattactgcaattacgtttattaatcagccgggagttgatccacataaaaaagatcagatggtgacaatgatgctgacaacgatctatcatgatcaaacgattgaatgggataaagtacggttgttactggcgccatttaagtttgaaattgcccctgaactagacgaagaaacgaaagactggttaaagaaattagcagaaaaataataacgttgactttcgttctgcttccttggtagaattaaatcgttattgcagagctgtggtggagtttttatcaccgtggctctttttattttgatttgaaggaggaagcgaaaagcaatggcagaaaaaaactattcacggatttatctcgcaattggttcccttgcattactaacgtttatcggaattttgaatgaaacatcgatgaacgtcacatatccagaactatctgctcagtttaatgtatcactcgatgttattcagtggattacaactggctatttattgatggtaacaattacgatggggacaactgcctatctattacgccaatatcaagcgcgttggttgcacttatttgcagtatcatttttcattattggtgacttgatgtgtgctttgactggtaattttcctattttgttaacggggagattgattcaagcgatggcaactgggttagcaaccccaatcatgttccatttaatttttacggagattccgcgtgaaagaattggcatgatgaccggaatggctgcaatggttatttcgtttgcaccagcactgggaccaacatatggtggggtcatttcagaaatgctgtcatggcggatgatcttttggattttactaccaattgttttgattagtcttgtatgtggtcaactttttattcgtaataaaccacttggaaatgataaagcatttagttatggaagcttgattacactggcaattgcccttattagtataattagtgcagtttcttcaattgggaaacaaggatttggcaagcagttttggcttttattattggtagcaattattttctttagcacctttatctatatcaataatcatggtaaatcagaattgtttgacttaaaggtgtttaagattttcccattgcggctatcaactgtcacttattttaatttacagtttattaatattggaatttcgcttgttattcctatttacgttcaatatgttttgcactcttcggcaattgtcgcgggtcttattttatttcccgggtcattaatcggtgcttttatctcgccatttgctggaactttggctgatcgttatggttttgctacgccagttatttccgggggattcttttggttattgggacaagttgcttcagtattttccaacgtcatttaacgccattactaataacgatcttctttgttattttgcgaattgggtttaactttgctttttctaatacaatttccaatgcttcaatgttggttcaaccgcaaaatgcccctgatgtaaactcaatttttaatatggtccaacaatttgccggctcactgggaactagtcttcttgcctccacaattgctttattccaaatgggcaacagcggttcactgatgggacgtacatatgctggaggacgatttgactttatcttattgggcgttttggcaatcattactttattaacaatggttactaactatcgcatgcaacaaaagaaggaaagtatttctcaataagtggttgaattagcctgacaagaatgtaataatgtggcttgattaatacaagttattacaggtttttaaagaaagtgactataagttaaaatgatacattctatcgttcactttatggtgagcaatcaggtttttacgctgtttatttgtcttgcaattggctttttgattggcaactataaaattgcgggtaaatttaatattggagcaacggtgggaacgttaattgtgaccctaatcgtggggcaaattgggagttttccccgggatgaaatgttgggaacgattttctttggcgccttcatgttctctgttggttatcggatcgggcctcagttattagttagtttgaaactatttgggattcgaattttaatcgctagtattttctggatggttgttgcattcttagttgggtggagtcttttttccgcctttaagattggaccagggatcgctgccggggttatttcgggagccctcacccagtcagctaccgttgccagttcgttgcaaacgattgggtcattgccagtcagtcaaagtgttagggcaacttatgaggctcaactcccagttgcctatgctttaacatatgtttttgggacattaggggtaattatctttttacgtgacctagcacctaaaattttggggatttcaattgctgaacagggtcctaaaatggctgaacattatcactttcatgctaaaaacccgaacccaacgtggcgacgaacatatcgcattgcaaatgattcaccgcttgtcggcaaaacgcttgaggaattaatcgacggtctaattaccggattattgggttagctgcttttcatgatggcaaaatgactgaccaccttgaatatcaattgcaggctggcgacttgctaactgttattggttacgctgttcatttcgatcggttgatgcgagtaccaggattaacagaagtattgacgccaaccaatgcgccgcgtgaacgagcttttgttctgggaaaaaactttaaaccgggtgaattagcccttctacggcaacatggggtttttgtgaacattcaagacccatcagtggaaaccaacaattgattaaccagttgcgaccaggggatgtgatttcattgactgggaatacatcacgaaccaaagcaatcttaaaaaagatgggacgctggaaagctgcagatacagcgatgaattattctttattctctttaggaatcggttgtgcttcccttttaggaattatcgggctaaaattaatagtattccgttgcaactaggaaatggaacggcggctttaattatgggactaatcctgagttcatggattgagcgtcaccgtccgtaaatcaatccctgtaacggtaactagctttcttcagagttttggactaacgctttttgtggggacagttggtttacaatcagctcaagcatttacaagtgcaattaagtcgttagggatcggggtcttatttattggggcgatgatttcaataatgccacatttgctaacgctgttctttggacgctatatattgaagatggaacctcttgctttaattggtgcgttgactggttcaggaacgattgcagcggcaatgaatgagatttcgcaaaaagcagggccggaaggtggcgcatattatgcggctgcctttactccggcgtttgtagttggtaatattggaattacattactagggccgatttttgtggcgctactatcataatttatcgcttagaaagggcgtgcaaaattataatgcaacaattttttacaattttaggtggaatggggacgctggcaacagagagttatgtacgtctgttagataaaagaacgccaattcatcgtgatcaagattacttaaactatttagttgttaaccatgcaaccgttcctgatcgtactacatggattctcgatcatagtcaaccagatcctaatgaggccctgattgaagatattaaacagcaaagtcttttgaatcctgcattctttgttttaatttgtaatacagcccattactcttttgataagttacaggcagcaacggagattccaattctcaatatgctgcaagaaacggttaacgagatcaagaagattaagccggatgcaaagcgggttggtctattagccactaagggaactttggcagctaacctatatgatccttatattgagaaggctgggtacgaacttatcaagccaactcctgagattgccgatatgacagaagacctgatttaccatgatatcaaagaggctggtcattccgatggcaagaagtatcatgagctagtacggaaaatgattgaagaacaaggagcagatgtagtagttttgggttgtactgaattatcttttgcagaagagatggatcctgaaactaagtaccctgttgccgattcacaatcaattattgttgatcgctcccttgaacgagcattgaaattacgacaaaataataaaaattaaaaattagagaccagaaaggtaataattccaacggtctctaatttttattaattttttgccgatattttaagaaattggtctagatttttgggaatggtgtaaaatatacacatgcgcaatgtttagcaaacaatggcgtaaggaggaaagaaaatgagttcacctgtttatattcaaattcataatcggttaagacaaaacattgaagatggtgagtggaaagttggcgataaaattcccgctgaacgcgaactcgctaatgattttggcgtcagtcgaatgactttgcggcaagcaattcaagcattagttgatgaaggaattcttgaacgaagagttggctctggaacttttgtcgctaatcgcaaagtccaagaaaagatgtcaggaataacgagctttactgaattaatgcacgcgacagggaagaaagctgctagtaagacaatttcttaccacttgacgatcccttcgcaaacagaggttgaaaagctaaagttagccccagatgaacaggttttacgaatggaacgggttcgttatggaaatgatgtgccaatttgttatgaaatcgcaactgttcctgctaacctcgttcaaaaatttagcaaagaagaaattaccacgtctttttatcggacgctagaaaaaaaggcgaacctctatcctggtcatgcaacccagcatatttcagcaacgaaggcgacggaaaagattgctaattacttgcagattaagcgtggagatgctctcttgcgaatgacccaactatcttacttgcaagatggtcgtccttttgaatatgtccacactcaatatgttggatcacggtttgaatttgtctttgaaaagtaatcaagacaaatccatgttacaatactgattaacgatattacttttgagaggaattatactaatgaaatttgattatccggatgatagccttaccctgcatactgatgcgtatgaattgagtatgatgcagacctactggaaaaaaggaatgggtaaccgccgtgctgtctttgaggccttcttccgtaaaatgccatttaataatgggtacgctgtttttgccgggttagatcacattattcgctatgtaaaacaattacattttactgatagcgacattgaatacttaaagtctacgaatcaatttgatgatgactttctagaatatttacgtaactttaaatttacgggttcaatcaacagctttgaagaaggagatctggtatttaaccatgagcctattattcaagttgatgcgccgattattgagggccaattgattgaaacggcaatcttaaatattcttaattatcagattatgattgcgacaaaggcttcacggattaagtcaattgttggtaaccaaactgtaatggaatttggctcacgtcgggcacaagaattggatgcagctttgtggggaacgcgagcagcatatattggtggcttcgatgcaacaagtaatgtccgtgcaggtaaattatttggtatcccgatttcaggaacccatgcccatgctcttgtgcaggtatacatgaatgattatgacgcatttaaagcatatgcagaaactcatcataattgtgtctttcttgtggatacttttgataccttaaagagtggggttcctaacgcaattaaggttgctaaggaatttggcgataaaattaactttatcggtgtccgcattgacagtggtgatatggcctacctatctaaaaaagtacgcaaaatgttggatgatgctggtttcccagacgcaaaaatcatcgcatctaatggcttagatgaaaagacaattcaaaacttgcaaatgcaaggggcgaagattgatacatggggaatcgggactaagctaattactgcctatgaccaaccaactttaggggccgtatacaaattagtcgctattgaagatgaagatggccaacttgttgatacgattaagatctctaataatgttggtaaaatgtcaactcccggcaaaaaacaagtatggcggattaacgatcgtggagacggcaagagtgaaggggattatattacattagttgatgaggatcctcgtaatgaaaagtcactcaatatgttcaatcctaacttcccactccagcaaaaagacgtggaagattttactgcccggccaatgctaaagccaatctggcaagatggtaagtatgtttatgatgaaccgaccttagaggagagtcgtcaacaccgtttcgatagcttaaatgctttatgggatgaatataaacgcgatttaaacccagaagtatacccagtcgatttatcacagaaatgctatgataacaaacttaaattaattcaccaagttcatgaatatgttaaatcattgaataagtagaggtaatctgtagtgcgaaagtatcaagaagaaataattaatgcattaggcgttaactcgcaaattgatccccaagcagaagtaactaaacgtatccagttcatctgtgattttctccaaaccactaagatgaaggccctggtattaggaatttctggcggtcaagattcaagtttggcggggcggctttcacaattggcagtcgaaaaactgcgggaagagactggcgacaatgaataccaatttatcgcagtccggttgccatatggtgagcaagctgatgagtcagatgcaatgtttgcaattaatgacttcattaaacctgataaaataatgcgggttaatattaaggcggctactgatgcgatggtagtatccttaaacgaagccggtacgccaattagcgattttaataagggaaacattaaagcccgggaacgaatgattgttcaatatgctattggcggagaaaacaaaggagccgtagtgggaacagaccacgccgctgaagcagtaactggtttttatactaagtttggggatggtggtgcagatattacgccactttctggattggataagcgacaaggaaaagccttattacaatacttaggagcaccagcaaaactttatgataaaacaccaaccgcagacttggaagaagacaaaccaatgcgtcccgatgaagaagcgcttggtgttcgctatgatgaaatcgacgactacttagaaggtcgtgaagtttcgccagcagctgctgaaaaaattgaaggctggtatcgtcgaacccaacataagcgccacttgccgattgctccatatgatacttggtggaagtaaattgataataaaatgggaggctgggaatcaactcagtctctttactagttttaaggagaatgataatggaagaggaaacacttcagcttgttagcaaacaattgccagatattcgccctcaacaaattaaagcggccctcggattaatggatgagggaaatacgattccttttattgcccgttaccgtaaggaaatgacgggcacgcttgatgaagttcaattgcaagcgatccgggatgaatatcaccgggtaacgacattacgggaacgtcaagcaacagttatcaataaaattaaagagctcggtaagctaacaccggcgctcgaaaagcaaattaacagtgcaactgaattgcaagaagtagaagacctttacttgccatataagcaaaagcggcagacaaaggcccaacaagctcgtgaacatggcttggcaccgttagcaaattggctgctatcttatcccgatgatgatttaagtgcgaaggcgcaagagtttattaacgatgatgttcctgatgctgaaagtgcattaacaggcgcccatgaaattttggctgaagcaattagtgaaatggccacggtacgaagctggttgcgaaattatactgctcaacatggtcaattagagacaagcgtaaaacgtgatggtgaagaaaaggatgaactggggacttacaagcagtactatgagttcactagtccagttcagaaattgaattcttatcaaatcttggcttttaaccgcggagaaaaagaagggattattaacgtcaaaatcactttagctgaagaaccagtgatgaattaccttcgttttcgtttgattaaaactagcaagaaaaatgatgcgactgcctttattgaggaagcttacaaggatgcttacaagcgtttcttgggtccagcaattgaacgggaactgcggcgacaattaacagagggcgctgatgaacaagcgattaaggtctttggtgaaaatctctatcatttattgatgcaagcaccaatcaagggaaaagttgtattgggcttcgatcctgcctaccgaacaggctgtaaattggcggttcttgatgaaaatgggaagttcttaaccaaagcggttatttatccgcataagccagcgccagaaaagcaacgagccgcagcggaaggcgaatttattgatttgctagagaagtatcatgttgaaatgattgcgatcggtaacgggacagctagccgggaatcagaacaatttgttgcggaagctcttaaaaagatcaaacggccaatctattatgtcatcgtaaatgaagctggtgcctctgtttactctgcaagtaaggaagcgcgtgatgaatttcctgacttgcatgttgaacagcgaagtgcaattagtatcggtcgtcgtttgcaagatccacttgccgaattagtcaagattgatcctcaagcggttggggttggacaataccagcatgatttgccgaagaaagaattgagtggggaactggaaacgattgttgaacgggcggtaaaccgggttggcgttaacctcaatacagctagttaccaattgttgacgcggatttccgggcttaataaaacaattgctaaaaacattgttacctatcgagatgaaaatggccgctacacaaaccggacacagttaaagaaagtgccacggttaggacctaaagcttatcaacaatctgttggtttcttacggattattggtggcgaaaatccattagataacaccgatgttcacccagaaagttatcaggtggcggaaaagattattcaagcggcaggaattaatgtcgatgagttaggaacgccaagtgctgatgataagttaaagaaaattgatgttaagcagttcacggatgatcaagtcgggactgaaaccgttactgatattatttcttccttgcaaaagccaggccgtgacctgcgtgattcaatgcctgctccattattacgccatgatgtaatgacgattgaagaccttaagccggggatgaaacttcaaggaactgtccggaacgttgttgactttggagcctttgttgatatcggtgtcaaacatgatgggttagttcatgtttcaaagatgagtaagcagttcattcgtgatccgcgggcaatggtagccgttggtgatattgtggacgtgtggattgatgatgtcgacttgaagcgtcagcggattcaattaacgatgcttgaaccggagacagtcacaaatgactaatgcagaattacaacaattgaccgaacagtggtcgaaagaatactttgggcgcgaatttacgcacaaggtattttttaataagcggttaaaaacaactggtggacgctatcatttaagtgaccatcatattgatatcaacccgttaatgtatactgagtttgatcttcataatctgcgccaagtggtccttcatgaattgtgtcattatcatttacatctgttaggaatggattatcaccatcgcagtagagaatttaagactttactagcacaggtgggaggatcaagatatgcgccaccgactagtaaaagaaagataaattccaagaaaaaatggcattatatctgtactggttgtggtgttgaattcgcacgacaacggcgttttaacacccaaagatatatttgtcgacgatgtggtcacaaatttattttaaaaaattgaaaaaagttgttgccaacgaataggtatcttgctataataatattcgttggttgatatgcggccgtggcggaactggcagacgcgtaagattaaggatcttatggtcgattatgaccgtggaggttcaagtcctctcggccgcactacttaaaaggcactgagcaatatttgctcagtgccttttttgttttaaaatttttgttcaataaaatttacgtaaattttacctctcctcttgctatcccaatcatgaaagcgctatactttagatgttgtagatagtaatgaggagggatttattcatggatgcagatatcaaatggcttgatgaaccggaaacattccgggttaatcaattacctgcgcatagtgaccattattactacggcaactatgatgaatggcgtcataataatagtcgttttgcgcaaaacttggatggtcaatggcaatttaactttgctgaaaacccgcgtgaacgtgaagaagatttttataagacagattatgatagtagtagttttggaacaatcgaagtccctagtgagattgaactaaataattacgcccaaaataattacattaacactttgattccgtgggaaggtaagatttaccgtcgtcctgcatatgcccttagtcctgatgatgcgcaagagagatcatttagtgatggggatgataatactgttggcgaatacttaaaacgttttgaccttgatccttccttacggggaaagcaggttcgcatccggtttgacggtgtcgagcgtgctatgtatgtttggcttaatggtcactttattggttacgctgaagacagttttaccccctctgaatttgacctgactccttacattcaagatgaaggtaatgttttggctgtggaagttttcaagcatagtaccgcctcatggattgaagatcaagatatgttccgtttttctggaattttccggagtgtaaacctattagcccaaccacttgttcatgttgaagaccttaatattcggccaattgttactgataattatcaggacggtatttttaatgttgaccttcaacttcacggtgaaaagaccgggaacgttaatgtgcgggttatcgacaatgatggtaatacgctcgtcaatgaaacacaccctgttgactccacggtagaagttcgggatcaatttttagaaaatgttcacttatgggataaccatgatccttacctctatcaattgttgattgaaattcgtgatgacgaaggtaatttggtcgaactcgttccataccactttggttttcgtcgaattgaaattaataaagatcatgttgtcttattgaatggtcaacggctaattatcaatggtgttaaccgtcacgaatgggatgctaaacgtggccgtgcgatcacgatggatgatatgacgagtgatattcaaacctttaaggaaaataatattaatgccgttcggacgtgtcactatccagaccaaattccgtggtattacctttgtgatgataacggaatttacatgatggccgaaaataatctggaatcccacgctacctggcagaagatgggagcaattgaaccatcatataacgtccctggttcagttcctcaatggcgtgatgtagtagtagatcgggcacggactaactatgaaacatttaagaaccacccgtcgattttattctggtctttaggtaatgaatcatatgctggcgataatattgtcaaaatgaatgaattctataagaagcatgatgacagtcggcttgttcactatgagggtgtttgtcatactcctgaataccgtgatcggatctcagacgttgaaagctggatgtacttaccacctaaagaagttgaagagtacttgaagaacaatccagacaagccatttatggaatgtgagtacatgcatgatatggggaactctgatggtggaatgggttcgtacatttctttacttgataaatacccacaatactttggtggcttcatttgggactttattgatcaagccctccttgttaaggatccggtaagtgggcaagaagtgatgcgctatggtggtgatttcgatgatcgtcactcagattacgaattctcgggagatggcttgatgtttgctgatcggacaccaaagccagcaatgcaggaggtaagatactactatggcttacacaaataaattacgcgtgatatatggtgatgcgacattaggacttagtggtgacggctttcattatatttttagctatgagcgtggtggactagaatcgcttaagctaaacggtaaagaatggctatatcgtgaaccaatgccgacgttttggcgggcaaccactgataatgaccgaggaagcggctttaatattcggtctgctcagtggttagcagcggacacttttcataagtgtgttgcgattgacctgacagttgataatcaacactttgccgaattacctattgcgccgataaccaatgaatttagtgatccggtatctgctgagaatgtcaagattaagtatacttttgagacgctaacagttccggctacgcaagtcactgtaacttatgaggttaacggacaaggtgagattaaagtgacaatgcactactacggtcataaagacttacctggtctgccagtagtaggaatgcgttttatcatgccaaccgttgctaccggctttgactatcaaggattatccggtgaaacttacccggaccggatggcaggagcgactgagggtaccttccatgttgacggcttaccagttactaagtatctagtccctcaggaaaatggaatgcacatggatactcatgcattaacaattacccgcgattccacccaaaataatgctgatcattctcgggaaccatttagcttaactattaaacaagacgagcaaccatttgccttcagttgtttaccatatacagcggaggaattagaaaatgcaacacacatcgaagagctcccactcgcacgacgaactgttctcgttattgcgggaccgttcgaggtgttgggggaattgatagctggggagcagatgttgaagaacagtatcatattcctgccgaccgtgatgttgagttttcgtttgtattgaatacaaaataagaggttggattatattccatgccgctatgttcgtaaaaagttgtataacaaaggtctctaacacccggtaaatccgaacgttagagacctttttgttttaattaatttgtccagctgcaatcccttggaagtatttcttaatatgagtacagaaataataaaggccataaattgcaagtatgctaagaccaactaatgagatcactaataaggcggtgaaccatttagcttgcttaaagtagagggtaacggtatttttccctttacgttgctgaacgtaaggggcaccaaccgaggatcgctgatagtggcgaagtagatgagcattagccgttaattgtgattcatgatacgtaataattggcaaccgaacttttcccgcttttcctgcttcccatgataattgcaatcctccatgcggcaagacagtatgagtatatttatgggcttcattaataatttgcccttcgtaagcgtaagaacgaacatatttttgattcatgtacttcttagggatcggcaaatagtcaggacttctcttctcaaccatcgttaacaattgaccagggtaaagatcatgaacggaatgtcgcagtgcggccttattttcacttacgcgggtaatcgcgctaaaactattaagaacaatttctgagtcatagcgggctgcacgtttataaacatcaattgttgtaggagtaaagaccagaaaaaccattagcaagaggataccggtgattaattgatttcgtaagtcaatctcttgcgcttttttatcaagggttgtagcgctgatcccaactcctgcgagtaagaggggaaaggcaatgattgtcaatcggttaggaaactgtaaagtgtgtccaagtgcagggaccacatcttggaaaaaggaccaaggagtaagggaagaactaagcaggaggaccaaagaaccaagtaacgtcaggactgtattagtaagcgattttttgaaggtgaataatacgtaaatgagttgaaggataaagagaagccacattgcgtagattagataatcgcgtgtactgctaaacattgaaggcagtagcacattatcggcgaggctaaaatcggcaggatgggcaatattattatggaggttaagcattaataaggctccccaaacattagccgttaaaataatagttccgccgactgccttcagcgtttcgatccacattttcttacggttagtcgttataattaacccaataataaagaacggtgttagtgtaatcacaaaaaataaagaacttagcatatggatctgaatgataatcgtcatcagggtcatcaattgtagccagttgactggtcgttggtgatcctgaatcatacgtacgccgcaaattaccatataaggagccagagcagctccccaggcattcatgttctgtgctaattcccatcgtggaagccacccaatgttcatatagattagggcacagataattgcaaatgtccgtttactatgaacgcggatgctaagttgatacataccgattccacctaatagatagacgataaaggtagtgacgatctgatattgataccaagttcctactacgccgagaatagccccatttaaatatgcaaagagggggccataaacggcattgatgatgcgaccactttgttgaaaactataattactttgaaaatagctaaaattaagctgttgaatttgcttagctgcatcgtaaaaacggttaaagtgaaaaatggagtccgtccctaaaataactccatgtgatacaaactgggggaacatgattaaataggccattgcagcgatggcacagtatggaagcccccaattaattagattagcaattttagatttcataaaattgagaattaaaccaaatcagtttaatttttcctttcctcaaatacttaccttaataattatacggcagaaaagtcgactgtaaaataaccttctgcagctagtttaattgttaagcactagtaaaatgcgctattataagcatagtggcaaaggggagtgaaaaaatggcagaattagtaattgtacgtcatgggcaaagtcaagctaaccgtgataatatttttactggctggactgatgttccgttgactcctaaaggaattgaacagggtgaattagtcggcaaggaattgctaagactgggtatccaatttagtgatgcgtatacgtcttacatggaacgggcaatcatgacgactaatattatcctagaagaaattaatcagttatatattcctgtccataaaacgtggcgactaaacgaacgtcattatggagcattgagtggccggaacaaagatgaagtgaagaaagagattggtgcagaacagcttcataaatggcggcgtggttttaaagatttaccaccacaattaaaagaacgtcagcatgatcaccgctatgatcgcttaggagttaagattccgcttagtgagagtttagaaatgacgctccaacgactcctcccatattggcaagaccatattgcgcctcgtttgattgatggacataatcagttaattgttgcccatggtagttctttgcgggcactaattaaatatttagatggtatttcagataacgatattgataaagtggaagttccaaatggcaagccaattttatatcgctttggtgatcaccttaatgtcattaaaaagacttttataacaatggatggtgaaattgatgacaatacacgaattagcaaataacccaacgttaagcggccaagtacgcttgattgaaaatattgtttatggtgcgatggatggtgaggcattacatatgtcgatcttagcaccgtggacgcaacgtttcccaaaacaatatcaaactgaacctcggccattgattgtctttgttcaaggaagctcgtggcgaaccccaaaaatgggagaagaaattccacaactggttcaatttgttcaggccggttatattgtagcgactgttcaacaccgtagttcaattgatggtcactcatttcctgcgtttttgcaagatgttaagacagccattcgtttcttacgggccaatgcgcaaaaatatgcaattgatccgcaacaggttgcaatttggggtacttcctctggagccaatgcggcaatgctagtcggcttaacgggtgatgatccgcgctataaagttgacctttatcaagacgaatcggatgcagtagatgcggtggttagttgttttgcaccaatggacgtggagaagacgtttgagtatgatgctaatgttccaggaaataagttactgcaatattgcttattggggcctgatgtatcaaagtggccagaaattgaaaagcaaatgagtcccctatatcaagtcaaagatgggcaaaactatccaccatttttattgttccacggagatgctgataaagttgttccatatgaacaaatggaaaaaatgtatatgcggttgaaggataatggaaattctgttgaagcgtaccgggttaagggtgcgaaccatgaacgagatttctggagtccaacaatttataacattgtgcagaagtttcttgacgatcaatttaaataaatttcaataattgtattgacaacttattttttataagttatgattttgacatactaagttaggaggaacacgtcatgtttaacaaacaattaattagcgctactgtttgttgttgtggatcgcgtcttatgcgacccacagtttggcgtgcttacttttagttgagtaactgctaacgtaatcgggaataaatgcataaggcgcaaattcaagtgagaagttcttgagtttgtgccttttttgtattcgtttttgcattctaaaggagatagatattatgaaattcaacacacaattaattcatggcggtaatagtgaagatccaaccactggtgcggtctcaacaccgatttaccgttcatcaacattccatcaacatgttcttggcggtgaacctaaatgggaatattctcgaacaggaaatccaacacgtgcatctcttgaaaaattaatcgcagagcttgaacatgggacagccggctttgcatttgcttctggatctgctgctattcatgctactttttctttattctctcaaggcgatcattttgtagttggtagtgatgtatacgggggaacattccggttaatcaacaaggtattaaaacgctttggccttgaatttactgttgttgacatgcaagaccttgaagcagtcgaaaatgcaattcaagataataccgttgcagtttattttgaaacgccaactaatccgctcttgcaaatcgctgatattaaagcaattgctgatatcgcaaaaaagcatggaataaagacaattgttgataatacctttgctaccccttataaccaacaaccgttaactcttggggcagatattgttgttcactccgcaaccaaatatttaggcggtcatagtgatgttgttgccggattagcagttactaacgatgatgaaattgctgaacaattagcgttcctgcaaaactcaatcggtagtacgcttggtcctgatgatagttggctattacaacggggaatgaaaactctcggtgcccggatgcgagctcaccaagaaaatgcgaatgaagttattaatttcctccaaaacgatgaccatattggaaaaatttattatccaggcttaaaagattttcctggtcatgagattgcggctaagcaaatgcggaactttggagcaatgatctcctttgaacttaaggatggtttagatgcgaaaaagtttgttgaaagtctacaattaattgatcttgccgaaagcttggggggaattgaaagtttgattgaagttccagctgtcatgactcatggatctattccccgggaaatacgattagaaaacggaattaaagatgagttgattcgtctttcagtgggaattgaggaccctgaagatattattgttgacttgcaacaagcacttaaaaaattagattaattatagaagaagggaaactgtgacttatgtgggaaattatcaagacatctttaccacaactcttagcagcgggatttaaatatacgattccgttagcgattatttcatttttctttggactgattattgcactagtaacagctttaattcgtctctctcgtcaacgtggcgcattcatgattcttaaatggattgctagtttttatgtttggctttttcggtcaacaccgctactggttcaattatttattgtattctttggactgccatatctgagaattaagggactcctgccgcatggaataaaattagaaccatttacagccggcattattacattttcacttaatactggtgcttatgcttcagaaacaattcgggcagcgatcagttcagttccaactgggcaatgggaagcaggcgcagctatcggaatgacgcggttgcaaatcttatggcgaattattttaccacaagccttaagagtagctttaccgcccttatcaaacagttttataagtttggtcaaggacacctcattggctgcttcaattacaattatggaaatgtttgctgttagtcaacagattgcggccgaaaactatcaaccattgcttatgtatactttggtagctatggtttatgcggtctttacgacaatcttatcttatttccaaggatatcttgagcgggtagtagaccgtcaagtaaatgcaaataataggtgagaaaaatgaaattaacaaatattaataaaagttttggtaataaaaatgtcttgaaaaataccacgttagagtttcctgaaggtaaaacaacagtaatggttggtccatctggatctggtaaatcaacaattctccgctcacttaacttactggtaatgccagagagcggccagtatgattttgatgatcatcatttggattttagtcaaaaagtaagcaataaagataagttggcaattcgtcaagaaacagggatggttttccaagactacaatctttttcctaataaaactgtccttggtaacattattgagggaccaacacaggttttgaaacagacaaaaaaggaagcaattgcaaatgcgaataatttacttgctaaagtgggcttagcagattacggggaagcctatccgaatgaattatctggtggacaggcacagcgggtagcgattgctcgggcattggcaatgtcaccaaagtatatcttacttgatgaaccaacttctgcccttgatccagaattagaacttagtgtgttgaaggttctattgcaattagctgaagaaaaacaatcaatggtaattgttactcataacatggcctttgcgaaacatgttgcggataagattatttttgtcgagaacggcgaaattttatataatggtactccggatgagttttttgctccagataatccaaataaacgaattaagaactttatcgcctcaatgacaatggaaaatttaaaataaaggaagtttagaataatgaaattttggaagaaagcactattaacaattgcagtcttaatggtcggtacctctgcaggaatcacaagtgtttcggctgcttcatcagctgttaattcagaattagttcataagggagaattgacaattggtcttgagggaacatactccccgtactcttaccgtaaaaataacaaattaactggctttgaagtagaccttggtaaagcagttgctaaaaagatgggcttaaaagctaactttgtaccaactaaatgggattcactaattgccggtcttggttcaggtaagtttgatgtagtaatgaacaatattacacagacaccagaacgagccaagcaatataatttctctactccatatatcaagtcacggtttgcattaattgttcctactgatagtaatatcaagagcttgaaggatattaaaggcaagaagattattgctggtacgggaactaataatgcgaatgtggttaaaaaatataaaggcagccttacaccaaatggcgattttgctagttccttagatatgatcaagcaaggtcgggctaccgggacggttaactcccgtgaagcttggtacgcttacagcaagaagaacagtactaagggtctcaagatgattgatgtttctagtgaacaagatccagctaagatttcagcactttttaacaagaaagatactgctattcaatcttcctacaacaaggcacttaaggaacttcaacaagatggaacagtcaagaagctatctgaaaagtacttcggtgcagatattactgaataattaaaaaagatctccaacgtctgtgtgttacagtgttagagatcttttttgaagggactgtgacataagttaggttacttccataaaatacgaacagcgcagtacaacaatggccttcagcgtccggcaaagtcgaacgctgaaggcctattgttgcttgcgggggctcgaaaacgaagtcacaagtgacttctgtcttgctcccttttcacaaattaatgttaaattattatgctaaagttcccattggatcccaaggcttaagaacgactgggctcttagcgtaatcacgtttaagatcttcgctaaggtacttcttattaataacgacttggtagcagtacttgtccatccaatcgtcactcataacgaagtaacctttatggccgaccttgttaccccatgagttttcaactttccacttggttggcttaccatctacaaggtcaacaccagtgataaccattgcgtgatccatcatgctttcaccataatcaagtgcttcagctttggtcatttcaagatcaacgtcaaatagtttgtcgtagtcataggtgttaagggccataatcccaagtttagtttctgaatatttaataacatctgaaccaaaccaaacactttcgccattctttaattgttcaatcgcaagctgcttgaattcatccattggtaggtttaagtgcttgatttcgcggccaccaacgacattaccaagcatatcgatggtgtaagtttggtggtacttcttatcagcagttggtgcttggatgattgaaatataatcatcaagattccagccaacatacttcttgaagaattcttgtggggtaaggttagtatcgcggtggaattcgttgtccttctttgtccgatattcgaagtcaaagtgactaaccggttcaccaaatgtgtaagcaagcatccggtaattctcgttcaacatcttccggcgcgtttcgttaattgcttcttcatttgcatgatcttcgttaatcatttttcgcaaaataacggcatcgtgacgaagcttgttgtttaagacttcatcaattccccgtgagttagaagagttaaatgattcgggcattgcggcttttggcataaccccatacttgctgataagggcgcaaagcatatcccattggccaccatcgttttgtggttcgttcattaaccatgaaacttttcggctgtcggtaggctttttagcagtcttaattacgttttggtagaagtaattagatttttcaaacttatcccagaagaactggtaggcttgggaaagttcaaaattatcaggtaagttaaatttttgctgcatatcatgacgcattgtgttcagtgctgcaaacatccaacaacgaccggattgtttttgatcagcaacgtcccccgtcttgaggtcaatagagaaatgaggagtattatcagcaattgaatgccaattaaagcttgcattccgtaccccgtttttggtaacagtattttctaagacactgctgttagggtgatgacggtagtttttatgaaaactagcgatatcttctttgttaattgaaaagctcatttgcaatatctcctttgaatagattgaattaacgggcgtgcaatacctttggaccttctggagtaccaacaattacgtcgttaactcgatttaagaataaaccagtttcgacaatcccaaccatgtggatcaattcatcggctaaggccttcggatcgtcaatttcgccaaggtgaaggtcaataatatagttattttcatcagtacggaactttttatctccgtccatccgccaagttggcttgtagcctttcttttcaagaaggtcaaagacatgttgggaaccaaatgggattacttcaaccggaagagggaaagcaccaagtttatggacgagtttgctttcgtcgacaatccacattactttatttgaggcattggcaacgatcttttcccaaagaagggcaccaccgccacctttgataccttggaagtcatcactgatttcatcggccccgtcaatagttaaatcgatgtggtcaacgtcatcaatatctttaattgtaattccgaggtcgcgtgcttgcttagcagttcggtttgaagtcgttacaccgatgatatctttgattttaccttcttggacttgcttaccaagctcatcaaccatatatttaacggttgatccagttccaagaccgacaatcatcccagatttaatgtacttaactgattccttacctgtttgttcttttaatgcattttgatccattaatattccccctaattaaagcgatctgcaactggcaatagttgctgatattctggatgtagtttgaattgcgctaccgcatatggacacatgagcttgacaatgtattgttcttttgttgcataatccacaaattgacgtactaattcagctgcaattccttgcccacggtaagttggttgcacaaaaacgcgttcaacgacaacgtgatcatttgtatctggaacttttggaaaactgatctcgccaactaaaggttcttgatcgtcaaaagcaatgatccgctgaccatcaactcgatattgcatataaacacatcctttcataataattttcgataaactgcttttaaaagtcaagttatcaaagcgataccattaatttattatctagcatataatagtatactggaattattaagaataaaacactatgaggtgaacgtaatgaaacgtggatttaagattgtttctagtaagaaaggccaagatatacatttaccccaacggcaaacaactcgggcggccggatatgattttgaggcatcagaagattttattctgccatcaatttggaaaggcaatttcttgaaggcgctatggcaaatccatcaacaaaaaaagctaattgatgaagaatttaaggctgctgattcctgcttaaagccatacttagtacccaccggcatcaaagcctatatgcaacctgatgaatttcttttattagctaaccgatcaagtggtccttttaaacgccgcttgattctaccaaatggaatcggcattgtggatgcagattattatgataatgatagtaatgaaggtgaaatcttcttccaacttattaactatgggctgcgggattatcatataaaaaagggagaacggatcggtcaggggatttttatgccatatttaatcgctgatggtgaagaacaaccaaccgctaaacggactggtggattcggttcaacaaaagaataaataaacttagagaggaattaaagcgatggcaaaaattcgaacacaatatgtttgccaaaactgtggttacaactcaccacgctacttaggccggtgtccaaattgtggtgagtggaatactttagtggaagaacaggtagagaccagttctgcaccaaccaaaaaagcaactaccaccttaaccggcttagttgccaaaccacagaaaattaatgagattgatagtacagagactccccgtgttaaaacaaaattgaatgagttaaatcgcgttttaggtggaggaatcgttcccggatcactaattctaattggtggggatcctggaatcgggaaatccaccctccttttacaagtttctggacaattaagtgatgagcatcaccgggttttatatgtgtctggagaagaaagtgggacacaaattaaaatgcgggcggaacggttgaaagttgctggggatgacttttatgtatatccagaaacgaatatggatagtattcgggatactattcgtgacctcaagccagagtatgtcgtgattgactcggtacaaacgatgcaggcgactgatgtaagttcagcaattggtagtgtatcgcaaattcgtgaagttaccgcccagttaatgcagattgctaaaagtaataacattacgatttttgtcgttggacatgtgacaaagggcggtgcaatcgctggtccaaagatcttggagcacatggttgatacagtcttgtattttgaaggagacctgcaccatacatatcgtattttgcgatcagtgaaaaatcgatttggttcaactaacgagcttggtatttttgaaatgcatacaaatgggctgacggaagtaaaaaatccatcagaaatctttttagaggaacgattacatgatgcaaccggttcagcggtggttgtttcattagaaggaacgcgaccaattttggttgaaattcaagcgctggtaacaccgaccgtttatgggaatgcacagcgaactgctaccggtttgagccgaaaccgagtatcattgataatggcggtattagagaaacgtgctaacctaatgcttcaaaatcaagatgcttacttaaaagcagctgggggcgttaagttagatgagccagcaattgatttggcaattgcagtaagtattgcctccaattatcgggataaaggaaccaagcccaccgatgcatttgtcggtgaagtaggtttgactggggaaattcgccgggtaaaccgcattgaacagcgggttgctgaagcagaaaaacttggctttaaacgaatctttattcccaaaaataatttaaagggttggaaaccatcaactaatattcaagtagtcggtgtctcaacgcttaaagaggcgttatatttagcgctggggtaaaataaataattgaaaggatgaagcaaatgcggcgtagaatgattactctcatttatattctagttggcgcggcagtgggattttactatttgccattattatgggggattttgaacatcgctcttaatccggcattattagtatttatcgacattattattggtgcacttattttctggctattatccctcccattggttagcggcactgaaaagttgatccagcgaatcgaaaaagaactaaccaagcgtagtcctgtataccttttctttgggactttattaacgattattggcttagttttagcagttcttatttcgattccattgtggagaacgaggattccggtaattaataatattctgccgatccttctaatgattgtctttagttattttggttttcgaattggtacgacgcggttagatgattggcgtaaagcatttacccatgccaaaagtagtaaaaccgatggtggtaatgtgattgaacggcaagatgataattatcaccattataaaatcctagatacaaatattctgattgatggacgcatttatgatttagtcaaaacgggttttctagagggaacattactggttcctaactttgttttatatgaattgcaatatatcgctgattctggcgaaagtattaagcgtgttcgtgggcgccgtggccttgatattttaaacaagttacggaaagaaaaaattgttccaatcgaaatgtatgatggagactttgaagatattccagaggttgatagtaaattaattgccctcgctaaagaagtcaatggggtaattgtgacaaatgattataaccttaataaagtaattcaattccaaaatgttcaagtattgaatattaataacttagcgaaatcattacgaccacgagttattccgggcgaaacgatgacggttgttgttgtgaaaaaaggaactgaacgacaacagggtgttgcttatcttgacgatggaacgatggtggttgttgaagatgggcgttactttatggataaacaaattgaagttgaagtaactagtgctcttcaaacagacgctggtcgaatgatctttgctcgtccgcttcattcacaacgaggaattgacgagcatacggatacggaacataaagaaaaccgaaataataaagataagaaaaaataacaaagaatggctgtgaagaagaaatagagttttcttgcttccggctattttttaaaataaaaaaagaagcagctcgggaaaaagctgcttcttagggagtattacgataatcttgggggagatttcgtaaaaaagaaaatatttttttcggttactattgggaggagtaattgaaaaataataggtttcattgatgtagtaaagttcatctttactacgatatatataatagcagtagaatgtgaagaaagtatgaccaaatgttaaataattttttggatacaaattaatattatcagaaatgctattctaatacggaatgtggtaagattaactgtacaaattaattctttattaatgatttttaaggagcggatagacatgctaacaatttacaatacgttaacaagaaaaaaagaagaatttaagccattgcatccaggcgttgttaacatgtatgtctgtggtccgacggtttataattacattcatattggaaatgcgcgcagtgcgattgcctttgatacagtccgacgttaccttgaattcaaagggtataaagtaaattatgtttctaactttacagacgttgacgataaaatgattaaggcggctgccgagcaagggattaccgttccacaattagcagagaagtatatcaatgcttttatggaagataccgcagcaattaatattgagccggctactcttcatccccgggcaacggaaaacattaccgagatcattaagttcgtgcaaggattagtagaaaaaggatatgcctaccctaaagatggggatgtttattatcgcgcacgaaagtttaaccactatggacagctttctggacaatcacttgatgatcttgaagttggggcaagtgaacatgttagtgcagatgaggttaataagaaggaagatccacttgattttgctttatggaaagcagctaagcccggcgaaattagttgggattcaccatggggaaaaggtcgtccaggatggcatatcgaatgttcagtgatgtctactaagtacttgggcaagacaattgatattcatgcagggggacaagaccttgaattccctcaccatgaaaatgagattgctcaaagtgaagcagaaacaggccaaaaatttgttcgttactggatgcataatggtttcgtaacaattggaaaagacaacgagaagatgagtaagtctctccataatttcattactgttcatgaaattatcaaggaagtagatcctcgggttttacgtttctttatggcgactactcaataccgacgtccaattcaatatagtcaggcaaacttaactgatgcgcaaaataatcttaatcatattcaaacagcctttgataacttgacttatcgtgaacaagatgccgataagggagaggttcaagaagtcactgatcggcttgatcaatttcatcaccaatttattacagcgatggatgatgacatcaatgtccaaaatgggattgctacagtctatgaattagttaaatatgcaaatgtttatgctcaacaagacagtgtgagcttaggtgctcttcatgcaatcaaaaaagaacttgttgaattgatgagtatttttggcgttaagcttgaagcaagtgacaatcaaattaatgatgaaaagatcaagcaattgattgaagaacgaaatgtagcacggaagaataaagattttgcgcgaagtgatgaaattcgagacaaccttaagaaacaaggaattattcttgaagatactcctcaaggaacgcgttacaaaaaggaatagaaaggatccttatggtacaagcagattatcgacaacttaatggaattgctttggcttatttaggggatgcagcttatgaggtttacattcgtcagcatcttttaaccaagggaattagtaagccaacgaaactacaacatattgctacccactatgtttcggcaaaagcacaggcggctcttattgacttgatgaaagaagacgagttactgtctgatgaagaatggtcgtattttaaacgtgggcgaaatgctaacagtcatactcacgctaagaatacatcagttatgacttatcggatttctaccggatttgaagcggtaatgggttacctcaaattagctggtaaagaagagcgattggctgaattagcgcaatggtgtatcgaacaagtagaagcggggcgaacagcacatgaaaaatgagaatacggattttattattggccgacatccagctgtgatggcactaaaatctgaccaagagatcaataaagtttttattcagtcggggttaaaggccgatgctatttcccagattgttaaattagcgaaggaacgccacttagtagtatcgaatgttcctaagaataaattggacttgatgactgaccgacaaaatcaccagggggttgtgttagctgtagcagcataccaatatgcaactattgatgacctctttgataacgcggctaagcatgacgaagatccatttttccttattcttgatgaactagaggatccgcataatttaggttcaatcatgcgaactgctgatgccgctggtgttcatggtattattattccacgccggcgagcagtaggattaacttcagtggttgccaaaacatctacgggagcaattgaacatgtaccagttgcccgagtaacaaacctggttcaaactgctaaagaattgcaagaacgcggtgtttggctgtttggtactgatatgaaaggaaaagattaccgaacatgggatgcgcatggtgccgtcgctttggttatcggcaatgaaggtaaaggaatttcatccttgctaaagaaaacttgtgatgaaatgctaacaattccaatggttgggcatgttcaaagtttaaatgcgagtgtggcggcaagtttgttgatctaccaaggctttaactctcgtcatcctttaaaataattttgattttattgcttttaaaccttgattcgtgctaacctaagtactgtgtggaggtgataagtatgtcccagaaaaaagtagcattggaatgtacaaagtgcggtgcgcgtaattatacgattaccgctaaccctcaacgacaagaacgattagaattacgtaagttctgtaaacattgcggtgagtatactattcatcgtgaaagcagatagtggaggaaaatatgcacttaattcgatttattaagagtgttaaccacgaaatgaagctagttgtatggccaacagctaaagagaatcgtcgtgatacgactattgttgtttcattgactctgttcttcgtactattctttgctctgtttgattggttaattcaattaatgatgaaactctttgtttaacattagtagtcaaatagaaattagtttgttatactaaatctaagggaacttcgtagctattacgaagttttttattttactgaaaaatgatttgaattatgataggaggattcatcgtggaatcacatgaaaaacgttggtatgtgctccatacctactctggttacgaaaaccgggttaaaagtaacttggaatcacgggctcaatcaatgggaatggaagactacatttttcgcgtagttgttcctgaagaagaagttcgccaggttaaggacggtcaagcaaaagaaacaattgaaaagacattcccaggctatgttttggttgaaatggtaatgactgaccaagcttggtacattgctcgtaatactcccggcgtaactggtttcttaggatctcacggtggtggttccaaaccaaccccattgcttcctgaagaagttgatcggattatgaaacggatgggaaccgaaacaactgttagtgacattgatgttaaggaaggcgatactgtaaaagttattgcgggatcctttgcaaatatgactgccaaggttgtagaagttgatcacgaaaagcaaaagattaaggcgactgttgaaatgttcggtcgtgaaacggctgctgaattaggctttgatcagattgatacattttagttaatttaatattttgaaaattgttgaaataaattgagaattgtggtatgttttctaagtatgctattaacatactgtgggagaggtaaaacttactgcctcatcatgaccacaacacggactaaggaggttttgtctcgtggcaaagaaagtagctaacattgtcaagttgcaaattcctgccggtgccgctacaccagctccaccagtaggtcctgcacttggacaagcaggtattaatattatgggcttcactaaggaattcaacgcacggactgcagaccaaaagggtatgttgatcccagttgtaattactgtatatgaggaccgttcattcgacttcattactaagacgccacctgctgctgtcttactaaagaaggccgctggtgttgaacatggttccggtgaacctaacacaaaaaaggttgcttcagtaacgaaggaccaagttaaggaaatcgctgaaactaagatgcaagatctaaacgcagctgacgtagaagcagctatgcgcatgattgaaggtactgctcgtagcatgggcttcactgttgaagactaattactagcagtcgggatgcgctatgaaaatagtgcacccacgtgggaggtataactccgttagaccacatttgcaaggaggaaaacacaagatggctaaaaaacgtggtaagaagtaccaagacgcgctcaagaaagttgacagcaagaaagaatacgctgttaaagacgctgtccaattagtaaaagatattgcctacgctaacttcgactctactatcgaagtagcatttaacttaaacgttgatacaaagcaagctgaccaacaattacgtggtgccgttgttttaccaaacggtactggtaaggatcaaacagttattgttttcgctaatggtgaaaatgctaaggctgctcaagaagctggtgctgactttgttggcgacgatgatttagtagaaaagattcaagacggttggcttgactttgatgttgcaatcgcaacaccagacatgatgcctaaagtaggtcgtttaggacgtgtccttggacctaagggcttaatgccaaaccctaagactggtactgttacgatggatgtagccaaggctgtttctgatgccaaggctggtcaagtaacttaccggactgaccgtgatggtaacgttgctgtaccattcggtaaggtttcatttgatactgacaagttagttgaaaacttggctactttagaagacattgtagctaaggctcgtccagcttcagtacgtggaacatacatcaagcacgcttccatttcttcaacatttggaccaagtgttacgcttgatttaactacattttaatttaaattagttaaaatgaaaaaagactttgagatttttgctcaaagtctttttttgtttcaatttttacttcacaatagagatttgttgtgctatattattaatcaatgataaaaagattaaaaaataattagattttatcatttgagtttaaaattaattaaggagtgacgacaatgacacaatttaaatattcaaagcgtgttccagcagatggtacggatgcggttggtgcaattttacaagcagcggcggatcctaagattatttcatttgctgggggattgccggcacccgaattgtttcctgttaaagaaatgaaagcagctgttgataaggtttttgaagaacacggtcaagaagcgatgcagtatggggcagcgaagggagttacagctttacgtgaagttatccaacaacatgtaaagaaaaaagaaaatgtggattccgaattagacaatgttttagtaacaacgggatcagaacaagccttagatttagtgggcaaggcatttgttgacccgggtgatactgtattagttgaacagccaacgtacctctgtgctttagatgtttttcgttcttacggtgctaattttgcgagtgttgagatggacgaagatgggatgaagatggatgctttagaagaagcactaaaggctaatccaaatactaagctcatctatactgtgccaaacttccaaaatccaactggacgaacaatgactgaagaacgacgaaagcagttagctgaattagcagaaaaatacgatgtatatgtactagaagataatccatatggtgaaattcgttttgctggtcaacatgtaccagcagttaagtcatttgataaatcaggtcatgtcctttacatgagtacattctcaaagacgttagccccaggatttcgtctaggatggttggttgctgataaaaatgtagttaataaattgacggttcttaagcaatcagctgatctccatacagataacttagctcaattcgcggttgcccaattctttgccgataacgatgtggatgcccacgttaaagaaattagtgctttatacggcaaacgtaaagatttgatgcttgagggaattaaaaagtatttcccagaaggagttaaatatacggatcctgaaggtggcatgttcttgtgggtagaagttcctggtgttgatgatacagtagagttatttaaggaatgtcttgaacatgatgtagcctttgttccaggtgatccgttctttgccgatggagttcaacctggtgctttccgtttgaactattcaaatatgaaagaagaccagatcgaagttggtttgaaacgtttaggagcggccttaacagctgcagttaataagtaattatttcagccattaataaatacaatcctaataaaatttcgaatttaaatacttaagggagcgaggcagaagagctctcgtaaacaataataggcctctatcgcttgaaattaccaggcgttagaggcctttatattgcactatttgtcttatgtggacgtaatctgacatatgtccattccttttttagtcattaaaatgtagtaggttaatatactccctctgtactttgagttaattgtgattataattatattaattgctgaaaagttttaaatattcgggtttcttgctatctaattgggatagtaataagcattatcaaaaatttttaagggaaaaggagtttttgatagtgtcaatgatagatttcactaatacagaaatggcagtagccgttatctttactttaataataatgtttgtaatatcctttgcagttagttttttattttggttgatttaccaccaaaatatgaaaaaaggataattagagatgataattataatttttacgcttatttgggggatcgcgctgtttatatttttagtttattcattgattagtctgctatttcggatgatttcgtatcctcgggactttcattacttcgcgggaaaccaacaaccagctaaaattgactacaatttacaatattataatattatgttattgttccatgttttaatgaggcagcagttattcaacgaacaatcaaatgtttgttgcgatttaagcaatttgaaatagtggtagtagacgatgctagtagtgacaattcagttagtcagattactaactcgcatatccaccttttgcgacggcatcttcctaatgcccatacaggcaagggggatgtattgaattttgccctagattatatttgtcagatcactatccgacagagggtttcttttgaaaaggttattattggcgtagtggatgcggatgcccaattagttgataatgccctacagcgattaaatgcctatttttcctcaccaaggacgaatattacccaaatgcgagttaaaatgtatccacattttaaaaattggttgcagattttacaagatattgagttttttagtattaactatatggcccaaattatgcgaatgtatactaaaacagttggtttaagtgggaatggccagttctttcgacttaaaccaactattgataaaattagtgcgcatccatggggtaatgcgctcttagatgattacgaactaacgataaaaatgatgctgaaaaaattgcatgttgattatatgacagatacatatgtttaccaggaagcgttaacgtcccctaaaagatttgttcgacaacgaagccggtgggtacaaggcgatttaaattgtcttaagtatcttcccgagattattaaaagccgcattttaagcaggacacagaaacttggtatatattatttcctgcttcaaccatggcttgattttcttgcagacgttgcgattattattttaacgacgattgcccttactcattggtacaatttttatggccacttgactcttttgactttttcattagtgatggccggcttggtagtcttttcgttattttggagaataatatttggaatattttactatcgtgacttagctcactatcacgaacctcctttaaaaaaaacaccaattggccttattaccgcttggaatttcctatatgtatgttatcttatttttagtattataatggcttattggcggtggagttttcgccaaaattcgtggataaaaacggaacatggaaaaatgtttcttgaatagcggggagatatgatgagaaagattaaagtaatgacggtatttggaactcggccagagggaatcaaaatgaggccagtagtcaaggccttggagcaggatgatcgcttttcatcggtagttgtttcgaccggtcagcatgctgaaatgcttcaacaggttttagctgtttttaaaataacacctgattatgatttgaaaataatgcgtcctggacaaactttaacggaaattacaattgaaacgatgacgaagcttgaaccgattattcaaaaagagcaaccagatattgtgctagttcatggcgatactagttcagcctatgcatcagctttggttgccttttataatcgggttgctattggtcatgtcgaagctggtttgcgaacctgggataaatattcgccttatccagaagagatgaaccggcaaatgattgatgatcttgctgatttatattttgctcccacccaaacaagtgctaacaatctcaaaatgggaaatcatcagcatgggattatagtgacgggaaatactgccattgatgctttgcagtatacgattgaccattcgtatcatcaccaagtattagacgaaattgatcccgacaagaagattattttacttactatgcatcggcgagaaaattggggtaaaccgatggaagaaacctttaaggcgattaaagagattgtggatcaacggaatgatattgacgttatttacccggttcatctgaatcctaaagttcaagcggttgctaataaaatttttggaaacgataatcattttcatttgatttccccattagatgttgttgattttcataatattatgagtaagtctttacttgtgatgagtgattcgggtggggttcaagaggaagcaccagcacttcataaaccagttctagttttgcgtgatactacagagcggccggaaggagtaactgctggaactcttaagttaatcggtacgcaacttaataatgtaatgaaagagttatcgtccctattaaatagtcctgaagaatataataagatgagtgaggcacagaatccttatggggatgggcatgcaagcgaacgaattatagatgctattgctaaatgggcagcaactcaaaaagaattataaaaagtccctttacagaacttcagagaatatgttaaactgtaacagttgattaaatatgactctgcctaagactcaggtggcgaaagccttaatcaaatgcctgccgaggaagaaatgaaagttccttctctatgtctgcggtcatagggatttttttataaatccgatcaaaaaaacattgcaggaggtgaaaattcatgagtgaagcagctattgctaagaaagctgaaatcgttaagcaaactactgatatgcttaacgcagctcaaagtgctatcgttgtagattaccgtggtttaactgttgcggaagttactgacttacgtaagcaacttcgtgatgctggtatccaaatgtcagttatcaagaacaagattcttgatcgtgctgttgaaggtactgactacgaagatcttcgttctacttttgttggaccaactgctgttgccttctctgacgaagacccaattgctccagctaagatcttgaagaagttcgctgatgaccacgacgctcttgaaatcaagggtggtttcatcgaaaagagtgttaagactcttgacgaaatcaacgaatacgcaaatatgccaggtcgcgaagaactgttgtcaatgcttgcatctgcattgcaagatccaatgcggaagattgctcgcgcagtcaaggctattgccgacaaggaagacaaagccgcataattgccgtatatcaatacaatataaaattaaaattaattacctaaatattggaggaaataaacatggcttttgataaggatgctatcattgcttcattaaaggaagcatcaatctctgaccttaacgacttagttaaggctatcgaagaagaattcgacgtttctgctgctgctccagttgcagttgcaggtgctgctggtggcgacgctgctgctaaggacagcttcactgtagaattaactgaaccaggttcagctaaggttaaggttattaaggctgttaaggacattactggtcttggtcttaaggacgctaaggaccttgttgatggtgctccatcagctatcaaggaagacgttaaggaagacgaagctaacgacatcaaggaaaagcttgaagccgccggtgctactgttacccttaagtagtcttaaattattaaataaaaaagagttacgaaaatattgttttcgtaactcttttttatttcagggataccatatgaggtgttcttttgtaatacgaaaatagctcccaccatttattctaaataaggagctattttatgatgtgtgcaaaattttagaagaacaggaaagttaaaagtaaataaatctactttgcaggatgagtagtactatcattgcttgtgcggtaaccaaagtagaattgaatagcagcaatagcgatgttaacccagttcatagcaataaaccaaccgttaattgcgcttgcatcatgagatacaccataataaacccaaaaaccgataacaattgcacaaatattgatccaagcgaaagtcttttgtagaatttgattattaagttggaaccacatccaaatgacattaatgacaaaacaaattgccaagatccaaaaaataacattaaataacataagatatccctccttagggcctcgataaacattaataaacgcgtattgaactgatgaatagcaacattcgaaaaaagtattacgcggtgtggttagcagttgaagttatttacaatgattggtaatactttactaattttgggaaagttgttgcttagcatcttcatacccgtcaacatagtcacgaagagcatgcatcttacctttaataaacttattggtgacattaataattcgttgtggatacttcctgaaaggttctagagccttataatccttaactacttgatcataacctttttggtatgcatttgttgcaccattttggctatttgacgtaggacaatttttttgaacatctttatcacctcttttgttgtcctaccatgatagtaacaagtatacaaactcaattccaatgatatggtataaaaattaaaatattatgcattaataaaaatactggttagaaacttttaaccagcatttttattaatctttattctttttcagaagttcagtaatttctttgaggtacataacttcttcgctaggagtatcttttttgttatcttcttttttgcggaatgtattgattgcttttaccattaagaaaacaacaaaggagataatcaggaagttaatgactgcatttaggaaacttccgtatttaaactgagcatcgccgaccgtcaaaacaagattagataggtcaattcgaccaatgaataaaccaataagggggttaataaggttattaactaatgattttacgattgaggtaaaagctgcaccaacaattatcccaactgccatgtcaataacgttaccacgagcaatgaatgttttgaattcttttaacataaaatagacctccttctagctctagaggggaacaacttcaattatgattatatcaaacagaattaaatgcttagggcttttatgagatgacataaggagatttaatttatttttaaataataattgcatattatatcaaaccattatattatatgacatataatattacagctaaaaaggagggatagaatgaagattcaaattacagctgacttactcgatgggatggtcttagcaattcttgaacacaaagattactatgggtatgccttaactcagcgaatgcaatcagctattaccatttccgaatcaacaatgtatcccgttttacgccggttaaaaaaagacggttatttaataacttatgatcagccttaccaggggcgaaatcgccgttattatcaaattacggaagccggcaaggagcatttacaacgtattcgtaagttatggactgattataaaaatagtttagatggtattttttatgggttaggtgagggagaagataaagatgaatgaacgtcaaaaatacattaatgatttatcaatatatttaagacaattaactgatgaggaacgaaatgatgccttagaattttatgatgaatatattgccgatgctgggctggagacccgaacagcgattgaagaaaggttaggaacgccacgacagttaagtcataagatattagccgattattccattaaagctaataatgagtcgatcaaagaaggacaccctgcttcgcctcattctagttggcgtgtcttttggtgggtgctagtagcaattattacttccccaataacgtttgggctaggaattgccgtattggcactattgttggcagcagggggagtcgccttaagtttgattgttggaatagttgctttaatttttggggttgctgccatagcgatcgtatctatttatattggaattggtttaattgcaacaaacctgtttagcggactattttattttggcttaggattgacactgatcggcttattccttgtttgtttacctttaatttactggttaatcagagttattgttcaagggattgcgaactttgctaagttcatttatgcaaaagtgcaggcaaggaggaaaaagtaaatgaaaaaagtatttaaggtgggagtaattgttttaatcttaggagtaatcctcctcggaataggcttctttaataatggtaacaaggctgtttattttgagaacaatcgtccagcaatttttcattctcacactaaaacaataagtactaataaagcttttgaacggattgatatctcagcatcgacagctaatgtaatagttcgtgaaggcaaaaaatatcaaattacttattctggtataagcaagcattctccggccgtaactgttcataataacgttgcttcaattcgccaaactggtggctttccgcttgtctttaactttaatgattatcagccccaccaagatttaatcattgtgactatcccacatgatcaagccatagctggtcgtattcatttagagagtggtgatctaacagtttctcaagttaaaatggacaatattgatgttaacagtgatgcaggcgaggttgaataccgtcaagttacattacgtggaggaagtacaaaactctcgtcaggtaacttcacaggacatgatttaacagttcaaggacaatatactgttaataatcaatctggtgataatacggtcacaaacacaactgttgatggctacttcctaaagactgatgcaggtgataatgaacttaatggtgaagataagggtgaagaacccttacatcagaatgatgatgcagaaaatgtgctccgcttgataacgcaatctggtgataatgaagtgaattaaggtaactaagattaataaaagcccctcgatatctagaaattagatgtcgaggggctttttaataggagaaaagtcttaatttttaattatgcgctggattatttttcttcaacgccagtaccatcgtagcaacgttcaagtaattccttgagttggctaacaagtggttcaactgggttagtagtagtacattgatcttcgtaagctaagcgagcaagatcgtcaactactttatcaaattcttcacgtgtaacgccattgtccttaagactaagcttaacaccacattcgtgagcaagttcgataactttcttagcatatgcttcagctaattcttcatcagtgttgcctttcaaaccaatgaaccgtgcaatgtcagcgtagtccttagttgcatggtaagtctcatagtgaggccagagagcaagcttttgtggacgttttgcgttaaagcgaattacttgtggcattgcaatagcgataagcaaaccgtgaggaagaccgaatgctccacccatcttgtgggcaagagagtggttaattcctaagaaggcttgaccaaatgccataccggccattgttgagaagtcgtgcatcttacgacgagctaacttgtcaccttgaactgacttaggaaggttttccataacacccttgatggtttgtagtgaccaaccacgagtgtaatcagttgccataacagaaacatatgattcagtagcgtgacataaaacatctagtccagtccatgcagtagtttttgctgggacagtttcaacgaattgtgagtcaacaatcgcaatgtttggagttaaggcgtagtcagcaagtgggtacttaacatgagtttctgaatcggtaataaccgcaaatggagtaacctctgaaccagtacctgatgtagtaggaatcccaataagttgagacttagtaggcttcttgatttggtaagcacgcttccgaatatcaagatacttttgcataaccccataccatgaagtttctgggtgctcatagaacatccacatagccttggcagcatccattggtgaaccaccaccaagagcaataattgtatcaggtttgaagtcgttcatcatggcaacacctttttcaacagtgtttgttgatggatcttcttcaacgtcatcaaatactaagaaagcagtgttgttttgacgttgacgcaattgatcgataacacgttgaacgtaaccacgcttgctcattccaggaccagtaacgataaatgctcggttaatgtttggaatatcttgcaattcttttagtgagttgcgttgaaagtatacttttgggggaatcttaacccattgacggttttcacgccgctttgcaattgttttgatgtttaagagatcccaatcagtaacgttgtgagaaattgagttaccaccgtatgaaccggtacctaaagtaagtgatggtgtcatgttgttgtaaatgttaccaataccaccgataccagatggagagttaacaatgatccgtgaagcacgcatttcaagaccgtacttagttgctaaatcatcatcaagggtatgaatagcagcagtgtgaccttcaccaccatagtgtaataattgagcacaaatatcaaaggcattttcatgtgaagtagccttgtacattgttaatactggtgaaagcttttcagctgaaagtgggtacttgtcaccaaccccttcatattcagcgatgataaccttagtgttttcaggaactttaattccacacatattagcgatggcgttagctgaacgaccagcaattggtccacgaacttggtgacgcttaggatcaatgaagccttcagtgaacttatcaatttcatttggcttcaagaagtaacagttccatttttggaattcttcttttaccttgtcgtagatttcttcatcaacaacaactgagttttcagtagcacagatcattccgttatcaaaagtcttagaaagaacgatatcgtaaacagaacgttcaatattagcagtcttttcaatgtaagctggaccgttaccaggaccaacaccaagagcagggttacctgaactgtaggcagccttaactaatgaaggaccaccagttgctaaaatagtagcagtcttagggtgttgtaacaatgcacttgtattttcgcggctactttcaggaagccactgaatcatgttctttggtgcaccggccttttccgcagcttcttgtaaaatcttagctgttttaatggaagatttcatggcttgacggtggaatgagaagataattgtattccgcgtcttagcactaatgattgatttgaagatcgttgttgaagtagggttagtaactggaacgatacctgcaataataccaagcggatcagcaatagtgatggtttggttttcatcgttgtcttcgatgattccgacagtcttatcatgacggatgttgttccaaatgtattcacttgcgtagatgttcttgatagccttatcttcggcaaccccacgaccagtttcttcagctgcatcaatagctaagtccatgtggtgttcttcagcagctaaggccatggcttgacaaattttatcaacttgttcttgtgagtagtaacgtaattgttcaaaagctgcttcacttttggcaattatgtcattaactaatttttgcgcattttgctttttttcttcttcagttaatacgtttttttcaacttgttttttgttgttagcaggcataattgaaatctcctttttcaattcttttctttgttaacatttgaacatgtataatattactacatttttttgctttgtaaatacccttgtgaacatttaaacaatggttgctttgtatgaattcgcttacaatattgtcttcataatacttgtatagcaacaaaaaacattggtattatttttgagattaagagatgatagatttgtatactgttattaattgaagtctgtttcacaaatagaatataaaagcgaatatattaatttaactcggctagttattaagttaactaatcattaacagattattattgggaataataaaaaagccaccattcagaaatggtagcttttttattaatcgcgggcattaatgtcttttcccgcgtttggatctttaacgtcataatcactatcattcattgcttcaacggcacccatgcgatacccattgccgacttggctaaaaaaatcatggttagaagttgaagtagaaattccattcataacaactgggttaacatcagaagcggtatcagggaatagtggatcttgaccaaggttcatcaatgccttattagcgttgtaacggatgaaggttaaaacatcatctgtccaaccaacttgatcataaagaagatgagtgtatttttcttcattatcgtatagttcataaaggaaattgtacatccaatctttcatatcttgttgttgcttttctgttcgatcacgtaagccgacttggaacttgtatccaatatatgtcccgtgaactgattcgtcccgtaaaattagcttgataatttcagccacgttatttaatttattgtggccaaggtaataaaggggagtgtagaaaccagaatagaataagaaagtttcaaggaaaacattggctactttctttttgagcggatcttgacttggatcaaggtacatatttgcaattttgacagctttattttgcaaatattcttctgtatcggaccattcaaagatttctttgatttggtctggggtattaagagtagagaaaatagttgagtaactcttagcatgaactgattccataaattggatattattaagaactgctgtttcatgaggagttttaacatcttctttaagggcagttaatcctgcttctgattgaacagtatcaagaagggttaaaccaccaaaaacatgtccgacagtccattgatgatcgtcatctaattcacgccaatcatccatatcattggcaactgggatccgcgtatcaagccagaactgttctgttagcttttcccatgtagctttatcgatcatgtcggaaacttcattccaattaattgctttatattgatttacaggtttaaattcttccagtttcattgattgagctcctccaaatacgttgcttttaataaatcgagatgccaaaagccatttgtatacataatatcaagtttaccagtgcccaacgtttaaatcaaattctgattaggcttagataacacagctttcacattggtttgcaccaatttcatcgctatcgtcagtaaacgttcgaatgtagtaaattgacttaataccacgtttataggcatagtgccgtaagatgtttaaatcacgagtcgtcattttatctgttcgtccatttttccattcgtaaaggcctgctgggattgttgaccgcataaagagggtcattgaaagagactgatcgatgtgctgttgtgcagcggcgtaagtgtcaataacctttcgcatgtccatatcgtaagctgaacgatagtaaggcatcgtgtcgtttgaaagatatggggcagggtaataaattttaccgatcatcttttcttgacgctcttcaacacgattaatgattggatgtagactagcagtcgaatcgttaatgtaggaagttgaaccgtttggcgctacagcaagacggtattgattgtaaagaccatcttgcattacattttctttcaacttcttccaatcttcaattccagggataaaaataccttcaaaaagacctttaacaacatctgattgtggtccccaatccttagtgacatatttgttaaagtaggaaccatcagcatatttactgttctcaaaatcgtggaaagtttcctgccgctctttggcaatttcatttgatgccactaatgaccaataatttaagagcataaagtaaacacctgtgaattcaatcgcaaccgggcttccgtattgaatatggtgcttagcgaggtagctatgcaatcccattgcacccaaaccaactgaatgggcaagccgatttccgttttgaatagttgggacaacatctaggtcttctacgtcactgattcgggttaatccccgcatcattgccttaatcgatttaccaaagtcagggctttccatcatattagcaatattggttgacccaagattacaactgatatcaattcccatttcagaatatgattgatcatcatttacttgcgctggtacttgtacttgagcaatctctgaacataaattactcatcacaatttttccattaatcggattatcccggttttctgtatcaatattgataatgtaaggataacctgattcttgttgaagtttactgatttcgtcctccaagtcccgggcattaactttcttcttgcgaatatcatcgtttgctactaaattgtcgtattcttttgtgatatcgacgtaggagaatggcattccgtatactcgttcaacatcatagggactaaacaagtacatatcagcattttgctctactaattcgtaaaacttatcaggaaccgtaattccgagagagagggtctttaagcgaatcttttcatcagcgttttccttttttgctcctaagaattcaataatatcaggatggaaaacactaaggtaaacgactccagctccctgtcgctgtcccagttgattggaataggaaaaactatcttctaacaacttcattacaggaacaactccactagcagcaccttgtattttcttgattggggcaccagcttcacgaaggttgcttaaattaatcccaacaccaccaccaattttagaaagttggagggcagaattgattgttcgaccaatggtattcatgtcgtccgttgtttgaatcgcaaagcaagaaacaaattctccccggcgtttacgcccaacgttaaggaatgttggagttgcgggttgataacgttgatggatgatttcatcagcgagctgcattgctaactcttcatcaccattagcgaggtaaagagcattcattgcgactcgatcaatatagttttcaaggtagtactctttatcatttgttcgtaaggcatattgagcataaaacttataagctgccataaaagaatggaagtggaagttttgggcttttaaataatcgtaaagcttttcaatgaatgcttcactatatttattcataaattcctcttcaatataatcattttcttttaaccattgaaaacgttcttttaatgaagaaaagcttttggtattcggttctacattatttttgataaagtcttctaaggccaatttatctttatctagttgaatttgtccgttttttgggatatttacttcgttgttataatcgtaatatttaactttggtcatatcgatatcggataacgccatattaataactcactttctgaattaatttgattatgtcaataaagaagccagtacaccaatagcgaattgatgcctggcaaaatattagtttatttaaacttaggcaagttggtttaattgatcaggacgaaagccagaaaaagcttgaccgttaggaagttttacaactggagtcgccataaaaccttcagacttaagttgagatatgtattctggttgttcatcgatgttgtgttcaataaatgaaattttgtgttgctcaaggaaacgttttgtcatcttgcattggatacaattattttttgaaaatacagttaccatcttcacgaggcctcctaaacgattagtcgatgttttctagtataacgatgaattagaaaaaatcaattaaaaaagcactatatttcgtacttgaaaaatagtgaaacacaacatatagtgcttgaactagtggttaacacctgtgaaactttttttgatagaatacttaagcaggtgcttaataaaattaatttgaaaaactaatctattattatacactgaacaacaggggaattttaagtgcttggagaaaaagaatgaaaaaaatcaattcatcattatctgaacaacaaaaatttatgaagatggcaattgcagaagcaaaacaagccagaattttagatgaagtaccaattggtgcgattgttgtccacgagggacaggtaattgggcgtggtcataatatgcgtgaaaagtttcaagatgttacctatcacgcagaaatgcttgcgattatggaagcatgcacgaatttaggaagttggcgtttagaggactgtgacttatatgttacgttagaaccgtgtatcatgtgtagcggtgccattatcaacgcacgaataaaaaatgtttattatggtgctgctgatccgaaagccggggcggttgatagcttataccatttactaaatgattcccgtttaaatcatcaagttaatgtccattctggtattttaggggatgagtgtagtcaaatgttaaaaaactttttccgtaaaattcgtcgccgccggaaagaggctcgacgaaaaaataaggctaacccctagtaatttaaagaaaaatagtgtattatactatttgccgtaaggccttagagcaagggtatgcttacgaaccgtgtcaggtctggaaggaagcagcactaagtatgatataccttgtgctctaagttttattgataattaagctgacccgtaatggtttattgcgggtcttttttatttttaaattttaattaaaatgtattttacctactttatgtgattaattccttgtataatattttatagtattttaaattcagaaagggagtctggcgatgagttatcaggcattatatcgtgtctggcgaccacagcgattcgatgatcttgtcggtcaacagattgttacaagaaccctaaaaaacgccattatcactcaccagataagccatgcatacttgttcgctggtccacgtggtactggtaaaacctcagcagcaaaaatttttgctaaagcggttaattgtcatcattccaaggatggcgaaccttgtaatgagtgtgagatttgtaaagcaattacaaacgggcaattaaatgatgtaattgaaatcgatgcggcttctaataatggggttgaagagattcgtgatattcgggataaggcaaaatatgctcctacccaagcggactacaaagtttatataattgatgaagttcacatgctttcaacaggggcttttaacgcactgctaaaaacgcttgaagaaccaccagccaatgtgatttttattcttgcaactacagaaccgcataaaattcctttaacaattatttcgcgggttcaacgatttgattttcgacgaatttcagcagaagatgcatttaatcgaatgaaatatattcttgatcaaaaggaagttacttatgatgaaaaagcattatgggtaattgcaaatgccgctgaaggaggaatgcgggatgcgttgagtatccttgaccaggttctttctttcagtgataatgaggtaaagttggatgatgctttactagttacaggaagtgttactaaacaattattaaaaaagtactttttggagattagtaagcatgaaggggcgactgctcttgacaccatgaaagatattttggatgaaggaaaagatggtcagcggttcattgaggacttgatttcctttattcgtgatattctgttataccaagaatcaccaagcttgattagtgttgaaagtacgggactaaagcaggaagactttgaagaaatagtccaacttgcttcttcagcgaccttataccaaatgatcgatgaactaaataatattcaagaagagatgcgttttacgacccatccggatgtgtatttggaagttcttacaataaaacttgcacaaatcgaaccacaaaagaatattcaatcggcaccagcggtttcttcggatacaaatactgaagctactaagacgattgaaaaattacaacaagagatacagcaattgcaacaaacagtaaaacagttgcagaatgcgccggcaaaggctagtcgaccatcacctcggcaacaaaatgagcaaccacgagtacaacaaaagaaagtgcaggttaatctcaataagatttacccagtgttagaaaatgcgactcgtcaagatttaataaatgttcgtgagctatggggagatatgttgaatctattgtcggtgccgcaacggtccttacttcacgtttcacaaccggttgccgctagtgccgtgggaataattgttgcttttgattatccgttcttattccaacaagcagctgatgatacaacgttgttagagaatatggaaagtgctctgcaacgtttaactggaaatgaacggcaagttgtttttgtacctaaggataaatggccaaaaattcggcaagactttatcaaggatcatggttttggtaagaatcagcaaaagtcgcaacctattaaacaaaagccgcaaactactgaagaaagcggacaaactcctgcagctacaccagcaccgatggaggaaccaccgctaccaccagaagatgagacactaactgaagaaaagtcacctcaagaagataaccaagtagcaacagcacagaagttatttggtagtgatattgttaaagtagaagataattaagaaaaaggatggatgatattatgatgcgtggaatgaatatgcaacaaatgatgaagcaggctaaggcaatgcaaaagaaaatgatggctgaacatgaagaacttgctaaacaggaatttgttggaaaagcaccggatgatatggtaactgctacgtttagcggggataatcaattaattgacttaaagattaagccagaagcagttgatccagatgatattgatatgcttcaagacttggtaattgctgctgtgaaagacggaatgaaacaagtcaatgatgctactcaacaaaagcttggtaaatatacgcaaggtatggggttgtaaaaagtgatccaatatccagaaccattagcaaaattaattgaaagctatactaagttgccaggaattgggcaaaagactgcaactcgcctggcgttctatactttgagtatgcaagaagatgatgtaacgaactttgctaaatctctcctatctgctaaaagagaccttcataactgtagtatttgtggcaatattactgaagatgatccttgtccgatttgtcgcgataagacccgtgatcattcgcaaattctagttgttgagcagttacaagacgttatggcaatggaacggatgcatgaatatcatggtttataccatgtccttcatggagttatttccccagttgcaggaacaggcccggaagatattaatattacaagtttacttaaacggttaaagaaagataatgaagtaaaggaaattattattgcaactaatgcttcatcagatggtgagttaacggctgggtacctcgctaagctaattaagcctgcgggaattaaggttactcggttggcgcatgggttatcagttggcgcagatattgactatgctgatgagatgacattattcaaagcagttcaagggcgaacggagatgtaagaaaatgttttttaagcggcctactaaagaagtggaacgtgaacggaatcagcgcctgttagaagcggtatattctacgaaggccagttgggatcatgcacgtgaaactgaacgagcagtatatgaagcaaacgttaatagtgaacttcattaccgttcccggattcaagaacaaaaatttttatacctatataaaattgctcgtaagtttaaagttcacgggacgttaaatgatggagtaattgatcgctaggagagagaaatggacggtaaatttatatcatttgagggaccagatggagctggcaagacaagtgtaatccaacagattcaacaacaattggaagatcagcttggcacagaaaaagttatgtatactcgtgaaccgggtggtaataagatttctgagcaaattcgccaggtactctttgatggtcaaaataccgatatggatgggcggacagaagcattgctttttgctgctgctcgtcggcaacacattgtttcagaaataattccggggttgaaagcaggcaaagttattctgtgtgatcgatttgtagatagttccatcgcttatcagggagctggtcgtggccttggtgaaaaagagatttggcaaattaatcagtttgcgattgatgggttaatgccgtcgttgacaatttaccttgatattgaatcggaaattggcttaagacggattgctgagcatcgttctaatcaaattaatcgattagacaaggaaaagcttgctttccatcaaaccgttcgtcaatcttacttgaaactttacaaaaattatccagaacggataaagttaattgatgcaagtcagccactggaaaaagtgattgaggatgtaaaagcaacaattcatgaccgtttttcagatttgttttaataaaaaagggtgattaataatgaaaatgattattgcaattgttcaatcaaaagatagcaatcgtttacgaaaagcatttaataaagctgatattcacgttactcaattatcaacaactggtggtttccttcgtgaaggaaatgcgacatttttaattggaattgaagatgaacgagttcaagaagtattatcagtaattaaaaagaatgctgagtcacgtgaacaatacgttacatcgcaaatgcatatggatgttgaaggaggttcagcatttcctgtcaacgtaaagattggtggggcaactgtttttgtcttaccagtagaagacttcattaaattttaagtaggtgaagatggttggctgaacagggacaaacacgtgcagaaaaattacaaccagcaataattactcgttttcaaaaaatattattaaataaagaacttgctcatgcctatctgtttgttgggccaggcggttcaggaaagatgtcaattgctcaatggttatcgttacggttattttgtcttcatccccaagacaataaaccagacttaacttgtgccgagtgtcagcgaatcctgtctgggaaccatcctgatattgtctatgctgctccagaaggtcgccaaataaaggttgatgagattcgtcacttaaaagcagaattttctaagagtgcggtagaaggcaataagaaaatttttattattaaagatgctgataaaatgacaaatggtgcagcaaatagtcttcttaagtttattgaagaaccggggactggcgtttatatttttatgctaacgactaataaaagtgctgtcttaccaacaatccgatcacgaacacaggtgattgaactgccaccattaaaacgagatgcgttgttaacagttttaactgaacataatattccatcatctcagcaacagattgctgttgggattacagattccgtcgcaatgattgaacagtggcaagaagataattggtttgagagtgcgatcaaaggagtcattcagtggtatcaagatacgacacgaaatgggatgttaggcttcgttgatgttcagacaattctacaaaaagtagctaccgaccgggataaacaacaagtgattttggacctaattaccttaatctggcgtgatacgctaatggtaaattccggaattacagttgccaaccgccttcactttaataatattttaggagaaatgggagaagtagttagaaaatactctcctcaacaattgttagcggctagtcagttaactttggaaactcgtcacatgttagaacaaaatattagctttcaaaatattgttgaacaattgacgattcggcttgtgcaggttttaagcattagttaggagcgaaaagatgagtgaagaatatagttcagataatctttatgaacaatttgcgcaggtgatgaaccagacccaggatttagttaataaaatggagcagttgcaggcaaaaattattgctatttctgaggaaaatgttgaactttcaattgaaaataagcatttgcgtcagatgattaaagaaaagcaatcacatcatagtgaaaaccaattatctggatcacggcaaaatttaaaagagctttaccaacagggttttcatgtttgcagtgagtattatggtaaacgtcttgagcctaatgaatcttgtactttttgtttagatgcaatattcggacatgaacaaggaatgacaaaataggagatagtatgcagcaaattagtagttttaatgatcaccaatcaggaagtttatacttagttccaaccccaattggaaatttagatgatatgacttttcgtgcaattaaaaccttaaaagaagtggatctgattgctgctgaagatacgcgtcatactcagcaactattaaaccattttgatatattaacccgtcaaattagctttcatgagcataatgctgaacaacgtgttccggaattgattgagaaattaaaagctggttattcgattgctcaatgcagtgatgcagggatgccttcgatttctgaccccggcaaggaattggtagcggcggcagttagagaagggttgccagtaatcccgcttccaggagctaatgcaggattgacggctcttatcgcttcggggttagttccccagccattttacttctttggctttttagggcgtaagcatcagcaacaggtagcggcgttggagcaattaaaagagcgtgaagaaacgatgatcttttatgaagctccacaccgcttaaaaaagactttagctacgatggcggaagttttcggtaatgaacggcgagttgttttagcacgggaactcactaaacgctatgaagagtttacgcggggaacgcttgctgaaacaactgcctggtttgaagatcatcaaccacgaggagaattcgttattctagtagctgggaatgaacacccgacagaggagacagataatgatattgaattaccattaacagaacaggttgataaggaaatcttaaatggtctttccactaatgctgcgattaagctggtggcaaagaaaaataatataaaacgccaggaattatataaacaatatcatcaattgtaggagaaaaatatggagttaaagcaagaagcacaaacatttgaaatgccgcacttactaacatattatgagtgtgatgaaacaagtcatccaagcctaagcatgatattaagtatgatttccatggtatccgatgagcatagtatgtctttaggaatgggaaccgaagaaatacaatctactggcggtacatgggtagtaagcggctatgaaggatatctttccgcaaatcaaccttcttttggcgaaacagttattttaggaaccaaagctgtttcctataaccgcttttttgctgttcgtgatttttggataacggataaagaacaccagattgaatatgcacgaattaggtcaatttttgtgtttatgaatctaaagacacggcgaatgcaatcaattccactaggtttaattgaaccatttaatgctcctgttgcgaaaagaattcctcgtctaaagcgacctcaaaaattggatgaaaatggttcgataataaagaaaaattatcaagttcgttattttgaccttgatgctaatcaccatgttaataatgcgcgttactttgattggcttcttgatcctcttggccgtgattttttacgagagaatcagataaaaagatttaatttgcagtatcttcaagaggtacgcaatggggaaattgtggaaagcaaagttaataagctccaaataaatgatggaacggtaacttaccaccagattggcgttgataagcaagttgatgcaattgctgagatagaatggtattaaaaattaatcaatgaataatagcgactggtttctaggcaggaaattagttgctattttattttagtcctaaatattagacgaaaagatcttaaatggtttaatgtagagacatttaaaggaagatggtattctatgaatagtagtaattatgaggagtgagttgacgtgaaaagatctttaacggcgattatttacctcgaacccgatcaggttaatttacggatcattgagatacctactttaaaagtgataaataatgttcgatcgggccttctaaatatcggaaacgctaaagttgctaattattcggaaaatatgactgcaattgttaataatattgaaggatttaagcagattattaatgactaccaggcaacaccagttaaattttatggcgatttagaagaccttgacccagttgcaactaggtatgtggccgaccagttagaagttcggacaggattacagattgaatggttaaacaataaccagctaatggcacagtcgatgagttaccttttaaccttgctaccagattttgaaaaacttagtaaacacaatatgtatcttctaagtatcggtcttagctcgactaccttagcttattttcaccatggaagctttgaacgggcatgggatattgatcttggtaatgcaaaaatcagtcagttggtggggcgtctccgaaaaactgctaccaatccaactgaaattatccaagattatatcagtagtaaattagaatacttaacaccagaactgacaaagaaaaagcatacagtaatgatggtgcaaaatgccctctcactcaataaattatttttgccaaatgatcagcaaatcgcggaagttcccctaaataaatttcatgatgattaccaaaagattttatcgccagtaaaagatggcttaatgaaaaatattcagattgatgaccaacaatttgaattattattaccaaattatttagtaacggcgcgaacagtgcgcttaattcaaccagcaggcctttacgtaactgatatttcaacgatggatgggatttcccatggaattggggttgataatcctaaaacgagacggcaaattaatgaaatgatcagaacagctgccgacaatatttcttcacgatacggtgttgattcagctcatcgggattttgtaacgcgcttttcactccaactctttgatcaattgcgcccaattcatcgtcttggtcagcatgagcgattattattagaaattgctagtagaattgatgacattggtaattttattaatcaacggggacactaccgccactctgcttatattatggaggctaatcctctaattgggctttcagataaagataatcggattattgctgaagtggcgagatatcatagtgcagagtctccagatattagtcaagctcattaccgccatctcgatgatgagatccagatgccagtagcaaaattagctgctattttacgattggtggatgcattagatgattcgcggctgcaaaaaatttcaagtattagattgaagctggtaggagatagccgcttaatcattaaagcaatagccaatgatgaccttgttcttgaaaagtggtcttttagtaaaaaatcacaactatttaaggatgtatacggaattgaaccggtcttaactgagaggagcgatcattaagatgtataaggagttttataagccgcagaattatgttaatcgagaattgagttggattgactttaatggccgagtactgggagaggcaactgatactgctaatcctttgttagaacgtgctaacttcttgggaattactcaaagcaatgttgatgaattttttatggtgcgggttgcatcgcttcataagcttgctgctgccaatgttactactactgatgcgtctggtctgactccagaagagcagttggatgcagtaaatgaaaaagaacaccggatggttaagcaacggtatgaagtttataatcagcaaatcatcccgaaccttgctaaaaataatattcatattctccatgtccccaaacttgacgagaagcaatatgaatttattcgtcggtactttaatgatgagctgatgccagttttgactcccatggcagatgatgcctcacgtccttttccttttatctccaataattctttaaatattgctgttcagctacggcgtcaaatccgttcaacaagtgaaccagttgcagaggaaattctagagggagatcaagaagttcatcgtccacaaatggaaccacatgatgatcgtcaagaagcagatatcaaatttgcaacagtccgtgttccagaaatttataagcggttagttcggttaccagaagaaaatagcttcattttgattgatgaaatcattactgaatttctgagcgcgctttttccaggatacgagatcttagctacagcgtcatatcgagttatgcgggatatggacttagatgtggctgaagaagatacgtctgatttgctccgggcagtcaaacggcaattgcgggaacgagagcatggacaggtgatgcgcctagaagttcctgcttctatcgatgaatggttaaaagatcaattaattgataatctgcatgtaagtgaacggtcactgtatgaagtagatggtcccgtcgatttaactttcttaaaaaaattatcggggatggttgatggtcatgatgacttgcgctatccaccatataagccatacctcaacccagcgttagatatggatcataatattttttcttcaattcgccaaaaggattacctaatgcagcatccttatgataattttcaagccgtggtcaactttattcatcaagcagccattgatccagatgttttggcaatcaagatgactctttatcgggtctctggtaattcaccgattattaagtatctcggaatggccgcgcaacagggtaagcaagtaacggttttagttgaagttaaagcgcggtttgatgaacaaaataacgttcggtgggcacaacggcttgaacagatggggtgccacgttatttacggtttagttggccttaaaacgcactgtaaagttgctttggttatccgtcgcgatgaagatgggctgcggcgttatatgcacctaggaactgggaactataatgatgtaacagctcatttttacactgatatgggattatttacttgtgaccatgagctgggcatcgatatgacaaacctgtttaatatgctgtcaggatttgcacgaccagcttatttcaatgaattacgggtatctcctgatgggattcggacatttattaatgccaaaattgatgagcaaattgaaaatgccaaaaatggtaatcctacgttaattcggatgaagatgaattccttgtctgacaagcaaatcattgcccgcctatacgctgctgctgctagtggagttaaggttgagttattaattcgaggcattacctgtttaaggaacgatttgccagaattgcatgggaatattgaggttcattcgattattgggcgtttccttgaacactcccggatctactactttaagagtaatggtcatgaggaagtctacctcgcaagtgccgatatgatgacgagaaatcttaatcgacgagttgaagaattgtatcccgttacccagccagacacaaaagctcatgcaattcatatttttgacgttatgtggaaagataatgtcaaggctcgacggttagtaggagatcattacgaacggattgatcgtggtgatgtcgcaccattcagttcacaagaatactttgttaaacaagcaatgaaattgaatgcgcgtgagaaaaaggagaagaaagcaaaaaaacatttttcttctgtttttgaaactttaactcgccatgttcccaatcttcatttagatgagcgaaaggatgagtaatttatgagcaatgagcagtaccttgcaattcttgatttaggttcaaattcagttcggcttaaaataacaaaaattcaagataacgggagctttgaaacggttcaatatgaaaaaagatatgttcgcctcgcttctaatatggggccagaaaaaatgttgaagtcagctcctgtaaagcggactattgatgccctaaaagaatttcgaacaatttgtgatcgataccgtaataagaaattgacaattattgcggtggcgactgctgcggttcgtcaagcacaaaatcaactgcaatttcttgaaaaggtcaagcaagaaacgggctttgaaattcatgtaattagtggagaacgagaagcatatcttgactatgttggtgttaatcagactcttccaattgataagggaataattgttgatactggaggagcaagtatggaattaatctcggtgaataatggggaagcagaagaagcgattagtattccgatcggttcagttagcatttcgcaaacctaccatcttgaagatcaaattaatccagctgatttatttgatgccatgattaaaattgatgaagttctttctcaacaattatggctaaatcggatgcgggagacaaaaattgtggcactcgggggatgtaaccgtgcattagcaaaggtatatcggtggcaacaagctcttaatcctaatgaagccagaccagttcatgggctaacaatgcgttcagaagaagcctttttgattatgcggcagctattagaaacggatcgccagacgcgggcaggaatccgtggaattacgaaagtgcgagcggatgtaattgttggaggacttctcccccttatctctcttgtccggcaattgtcaattaatgagatttgctttagtaatagtggattaagagaaggtttattatttaagtaccttgagcagcaaattaattttgatcaattaaaatcctcgctataaaattatccactaaaatttttgcttatttttactaaattttactaattagaaacagtaaaattgtgctacaatcactatgaaagctttagttggagcaaggaggaaacaagatgtcaattttagttgctggtggtgccggatatatcggttcccatatggtaaaagatcttattgaaaatggtgaagatgtagtagtggctgataacttatcgacgggtcaccgggatgcgattaatcccaaggctaagttttatgagggtgacattcgtgatcgtcaattcttagataagatttttgacaatgaagatattactgcagttgttcactttgctgctttctcaattgtacctgaatcaatgagtaagccattgaagtactttgataacaatactggcggaatgattactttgcttgaagcaatgcatgatcatgatattaagtatattgtcttcagttcaaccgctgctacttatggggttccagaacacatgccaattaaggaaacggacccacaaaacccaattaacccatatggcttgagtaagttaatgatggaagaaatgatggcttgggctgataaagcttacggtattaagtttgttgcccttcgttactttaatgttgccggggctgccactgatggtacgatcggtgaagatcacggtccagaaacgcacttagttccaatcattcttcaagttgcgcaaggcaagcgtgatgaattgagtatctttggggatgactacaacacaccagatggtaccaatgttcgtgactatgtccatgttatggatttagcagatgctcatattcttgctattaagtaccttaaggaaggtaacaagagtaatgcctttaaccttggttcatccactggcttctctaacaagcaaatgctagaagcagctcgagaagttactggtaaacctattccagctaaaatggcaccacgccgtccaggagatccagattcattagttgctgctagtgataaggctcgtaatgttcttggatggagtcctaagtatgatgatgttcacgacattattgcaactgcttggaagtggcattcaactcatccaaagggttatgatgatcgcgactaataatcggctttaaaataacaaacaggctctcagtaaaacttttgctggggcctgttttgtcgtaaataaacaaaagaaattaaaagagaagtcaaagcggatccagtgtgataagatgtaagatgattgaaaggattgataaaagatgaagattctagccgtcgatacatccaaccacccaatgagcgtagcgttggttgaagatgagcaattgttggcaacgacaacccttaatatggttcgcaatcatagtatttatttaatgccggcaattagtaagttatttaagttagttcagtggcagccaacagatattgatcgggtagtggttgcacagggaccaggatcttatacaggagtacgaattgcagttacaaccgctaaagtattggctgatacagaaaagattgacttaattggcgtatcaagtttagcagtattagcacgtaatgtagttccaacatcatcagcaattattgttcctttctttgatgcacgacgaggaaatgtatttgctggtgcttaccagtgggaaaatggcgagttagtaaataaaatagaagatcaacatctagggattgatgttttgcttaatcaacttgcaaaattagatcaacaagttgttttggtaggtcatatgactgataaaattcaagccaaatatgatcaattaccagctaatgtgacccttttgccacgatcttatagtattccgtcaacttatcaattagctcttgcaggtaaaatgaaggaaccagttaaagagattgacccttttgttccgcattatttacgaattactgaagcagaggctaattggcaaaaacttcatcctggagaaaaaagaaaaaattatgttcgagaagtttaaagaatggtttatcaatacgaccaatcctactaaacgaccgatccttgaatttacacgacgaatagtaatgatatctggtcatcaatacatggtccggatggcaaaggaacaagatattcaaaccttggtagaaattgaagaaagaatctatggaaaagcaccatggagttatgctgctttccgcattgaactccaacggccgtgtgatcgactatatttagttgttgaggatgaccagcagattgttggctttatgggaacagccattgattggtaccattatgatttgcatattacgaatattggcattacaccaagttaccaaaataaaggaattggaacgtatcttatttcaactgccaaaaactatgcccggcacttaaaattacattcgctgagtttagaagtacgagtgtataacgtatcagctcgtcgcttatatgaaagtttaggctttcgtaatcagcatattaaaccacgttattacttagataatcacgaagatgccgtggatatgcaagcaaacttacttaggtagaggtgaaagtattttattatgacagaacgcacattaaccttagcgtttgaatcaagctgtgatgaaacaagtgttgccgtaattgaaaatggaactaaaatcctttccaatattgttgcaacgcaaatcgatagccatcaacgttttggtggagtagtaccagaagtagctagtcgacatcatattgaacaaattaccaagtgtacaaatgaagctttagagcaagcggctgtaggctatgatgacctagatgctgttgcagtaacatacggtccaggattagtcgggtcattattaattggtgtgacagcagcaaaggccatcgcatgggctcataaccttccgttaattccggttaaccacatggcaggtcatatctatgctgcacgctatgttggggaattcaaatatccacaaatggcattgttagtttccggtggacatacggaattagtttatatgccatctgaacatgaataccaaattatcggtgaaacacgtgatgatgctgccggtgaagcttatgataaaattggtcgcgtgttgggagtcaattacccggcaggaaaaacgattgatgaatgggcggctaagggtaaggacacttttaatttcccacgagcaatggaaaaagaagataattatgactttagctttagtgggctgaagagcgccttcatcaatacagttcataatgcagaccaacgtggagaaaaattagataaatatgatcttgcagccagtttccaacaaagtgtcattgacgtgcttgccgaaaaaacaatgcgggcgttagatgattacccagtaaagcaactgattttagctggtggggtcgctgcaaatcatggtctccgtgctcgtttagatcatgacatgaagaaatctcatcctgatgtaccgatgctgcaagcaccgttgaaattatgtggtgataatgctgcaatgattggggctgctggttatgttaactacaagcatggcgaccgtgcaggattagatttgaatgcagtaccgggattaatgttcgatcgaattcagaataaataattataaacataactctcataagcaatgatggcctccagtgttcggtaaaaccggacgctggaggccattattgtactgcgctgtatggatgtaaccgcggtctttttttgcgtttatgattcaccatttgctttgtcaacggcatccatcatggcgtaacggaaaccatttttctccaatgcttccacgcctttgattgttgtacctgctggtgatgttacttgatcacgtaataatgctggagcaagcttgctatcataggctagtgtccccgtaccttttaccatactagcaataacttcatatgcagtttgacgatcgaggccatgcttgacggcggcatcgctcattgcgtccatcatcacatcaacaaatgcagggccacagccgccgataacaccaattatatctagttgtcgttctggaactttgatgacatcaccaagactatctaaaacagtcattacttttgaaattgcttcagcagaaattccggttggcaaggcaagaccaattgtgccggcattaacttcaactggtgtgttgggaataatattaacaatttctttattcggaagcactttggctaagtcttcgtgagtaattccagcagcggcagagataaaaatagtgtgatcgttaaggacggctaattctttagcgactacggttgtaataggggccggggtagtcaaaattacgatatcgggtgtaaggttaactacttcactgtttgtattaacgagtttaaacccgagcttcttagcaaggcttgtaacacgtgaattaacagggttcatcgcactgagggtaaaattttgcgtacgacttaatcccttcataattgcgcttcccatatttccgacaccaataattgtaattttcatctaaaaaacctcctaaattatttccgaacttgcccattaccggtaatttcatatttgattgttgttaattgttgtaatcccattggtccccgggcgtggagtttttgggtactgataccaatttcagcgccaaagccaaattctcccccatcagtaaaccgcgtagaggcattaacataaacacaggcagaattaatggcttgttggaagtagcgtccccgggtaatgttgtttgtaataattgattctgaatggtgagtactatggtgattaatatggttaattgcatcatcaagggaatcaacaatttttacggccataattaaatcattatattctgtctcccaatcttcctcagtaacgggacggatagttgatactaattggcacgccatttcatcaccgcgtaattggacgccatgttccattaaagctttggcaataacaggaagaaattcagcggcaatatcgcggtggataagtaatttttcagcggcattgcatacagaaggccgttgtacttttgcatttacagtaatattggtcgccattgttaggtcagcatccttatcaatataaatgtggcaattacccgcaccagtttcgataactggaaccgtagctgttgttacaacccgctgaataagggcctggccgcctcgtggaatcaagacatcaatgtagtcagtgagattcatcatttcatcagcaatcgcatgactagtgtcggtaataagctgaaccgcatcgaccggtaaatgttgactttgtaatgattcacgaagaatttttactaaggcagtattagtctggatagcttcttttccgccccgtagaataactgcattgccactcttgaatgtgaggccggtcgcgtctacagctacgtttggtcgtgcttcaaagataatgccaattacccctaatggtacgcgccgttgaaggatttgcaacccatctttggtaatccatcccttatcgatttgggaagtgggatcgttcaagtcggcgattgttcggagaccattagccatgtctgcgatacgttgggaattgaccattaaacgatctgtaaatttagttggcatctgggtagcggcgaccaagtcttgttggttggcagcgataatttggtttttatttttgattaaatcatctgccaattgaagcaatgccttatttttggtggcagtgttcattaaagctagtttgtttgcagcgatttgggctctttttccaattgtaattaaatcttggttcattatcatcactcctattttccaaaatgagtaccaatagtatgaccatcaaaaatatcaaaaagaattttagggtcacgaccattgcataaaatcatttgtttacctgcttgcatcattgtggcagctgcccgtaatttagttaccattcctcctgttccaaacctagtgctgctaccgcttgcgacgttctctatttccgtcgttaggaatggaacttctttaatgatttgtgcgtcaggaaatttatgcggatctttgtcataaagggcatcgatatccgaaagaatgattaactcgtcagcgtcaatggcaatagctacctgggaagagagttcatcattgtcactgaaagtagtgtaatgatcaagctcatcaactgacacggggtcattttcgttaacgattggaatcacattttgctgaagtaaagcattaattgtattaagcgtatgctggcgactgacgggataagtgagcacatcacgggtaaggagaagttgggcgacgtgcgtttgatagtctaaaaatcgttgcgaatagattcgcattaaagcagcctgaccgatagatgctaaggcttgctgttgtgctatttcggcgggacgatctgttaatcccaaacttgcaagaccaacgccaattgctcccgaggaaacaagaataagttggtatccttgattgtttaatgtcgcaaggacaaatgaaagttggtcgattgttcgtaaattaatttttccattaggaagaacaaggctactcgtaccaatcttaacaactactttttgtattttatgagtcatagaaaatcctttcagaaaacaaaaagcgcccttaaccgagacaccaattatggcggtaccattctcgtttaaagacgcactttacacttttaaattattttattattagaatatattaaagttgtagcagggcttcggtactggcgatagcttgcagtcgatggctatcgttcctggactgacctacttttatctacaattaaaattttaattggaagactaagcttttgtcaagactaattatttttgagattcaattaaaaatgaattgacaaataattaaaaataaattagaatacgagcaacaattaaatattagtcgtttaagaagagtaaaagcaatgtagtattaagagagttttcgggtggtggaagaaaattacaaattgctttgaagatggtcttaaaaaatacaacaagtgtgaggaaaaaactaagcacttgtcggctgatatccgttatcaagtatcgaagtttattatgaacttcctgaggctattcatgtgagtggatagtaaattaaggtggcaccacgaaaatactcgtccttatttaagttaaggacgggtattttttatggaggtgaaagtgatgaaacgcaaaattgcattagctcaacttgatattcaattaggaaatcctgccgaaaattatcaaaaagctaaacaagcgattgaagaagctgctagtcaccatgcagatatcgttgtcttgccggagatgtggaatgctggctatgccttagatcaattagcagaattggcagatgaaaacggtcaaaagacacaaaaatttcttagtgagttagcgttagaaaatcaaattaacattgtcggtggttcagtagcggtgagatgtggacaatcttttttcaatacaacctatgtttatgatcaaaagggaaatctaattagcagttacgagaaggtgcatttatttggactaatgaatgaagaccgatatctaaaagccgggcaaaaagaaaatcactttgaattagctggggttccgagtgcaagttttatttgttatgatttgcgattccctgaatggattagaacagtcactcgttatggaactgatatcttatatttttcggcagaatggccaagcaaacggattaaacaatggaaaataatgcttcagtcacgggcaattgaaaatcaagcctttgtagtcgcggtcaatcgtgttgggacggatttagagaatagctttaatggtcattcgttagtaatagatccgcttgggcagattatccatgatgcaggagaagttgaacaagtaagttatgcagaaattgacttagcgcagttagcacaggttcggggccgattccggtgtttaaggatcgccgaccaagtctttatcattaaggggatggaaaagatgaattttgcacaatcaaaattattagacactttaccgaaacaattttttgccaatttagttgccaaggttaataaaaaaataagtgaaggggtcgatgttattaatcttggtcaagggaatcccgataagccaacgccagattatattgttaagagcacgcaaaaatgggtagcggatccgcaaactcataagtattcactatttcggggattgccagcatttaaagaagcagcggcaaaattttattctgaaaaatatggagctgactttgacccagaaaaagaagttgcaattttgggtggttccaagattgggcttgtagaattgccatgggcattgatgaatcccggcgacacttttctgcttcctgatcctggctatccagattacttatcaggagcagcattaggagaagttaattttgaaacagtaccattattagcagaaaataatttcttgccagacttagaggcaattcctgaagaggtggcgcaacgtgctaaattcttctatcttaactatcctaataatccaacgggtgctgtagctactcccgagttttatcgaaaattagttgcgtgggccaaaaagtaccatgtgggcattattagtgactttgcctatggcgcaattggctttgacggtcaagctccagttagctttatggaaacaccaggcgctaaagatgtggggattgaattttataccttttctaagacgttcaacatggcagggtggcgaatcgcatttgcggttggtaatgcagatattattgaagccttaaacttaattcaagatcacctattcgttagtctttttcctgccttacaggaagctgctattgatgctttaacgctgccacaacgtgatgatgcaattgccgaaattgtaggtcgttatgaagaaagacggaatgcttttattaatgcggccgaaaaaattggctggcatgcatttactcccagggtactttctatgcttggatgccggttccaaaggattataccagtgaaagctttgcagatttgttattggacaaagctggcgtggcagtagcaccaggcaatggctttggcaagcacggtgaaggttatgtgcggattggccttttgattgagccagcacgactgacggaggccgttgagcggattgctaaattgaatttatttagttaaggaggaaaaattatggctttgaaatatacggttttaggtgcaggggcaatgggactacgatttgggtattgcttcaagaattagcaggtgcgaaggttgattttgttgataactgggcttcccaagttgaaactattaaacaacagggtggggtttacgtttctcgagaccatgagaatcgacatcttgtaccaattaatatttactcaccagaagaatatgatggtgatccagatgtgtttatcgtttttgccaaacagatgacgcttagtgatttgttacaacgcagtgctcatttcttccgtcctgaccatcaatatgtcttttccgggatgaatggcatgggacatattgaaaaaattaaccaatattttcctaaagaacatgtcgtggccggaacttgtttaattggcacggtccttaataaggcggggaatgtggattttattggtaaacctggtgctggttcgatcaacttagctccccaagtcggcgaaccagatgagcgggtaaaacaaattgttgaggactttaccacggcgaatattaatccccaccttaatgataatttttatggtaccctcctaacaaaagtagtttttaattctgttattaacacgatctgcacgctttttgagattcaaatggggcaatttatcgattacgatggtgcagaaaagcttggcaaacagttaattaatgaagcattcgatgttgccgaacgggctggtattcagctcttaagcactcgtgaggaggagtggcaaacgattaaatatgttagtgaagttaccagcccgcttcattatccatcaatgtaccaagatatgagtaaaaatcgaccaacagaagtagattacattaatggatatatttatgatttaggtaagaagtataactatgaggcatctactcacgacttcttgcgtaatttagttcaccttgcagaaaatactcgtaaattccgacaaaactaaaagaagaagcggacctgtccgcttcttcttttagttttcttgatcaaattcttccagtttttctgctgcttctgtccatgcaagttcaaattcttcagatttagctgataattcatcaagttctttttgaagatcggttaattttccaatatccgtagcgatctctggttgactcatttgttcttggattgcggtttgtttttcttctaattccgccatctgttgttctagctcatcgacttgtcgctgaatttttcggcgagcgcgctgctgttctttgctttgctgataagattgtttaccagctggtgctttagtaatggtggtggaattatgtgaagcagcttcagatgaactttctttttccttagcaattaggtagtcatcataattgccttcgtaatgtttaattccgtcgtgttccattgctaagatatcggttgcaacctgattaataaagtaacggtcgtgagaaataaagagaacggttccgctaaattcgttaattgcgttttcaagcacttctcgactatcgatatctaagtggttagtcggttcatcaaggataagaaaattaatcggtttaaatgagagcttagttaactccaatcgtgctttttcaccaccagataggtcatgaacaactttataaacatcatcaccaacgaataagaaactacctaataatgagcgaatatctttttcaggtacttctggatggtcatcccatacttcttctaaaactgttttatttggatgtaattgttgctgttcctggtcatagtaaccgatatcgaggttagcaccgagtttgattgttccactaattaacggaattttatggagaatagatttaagtaaagttgattttccgattccatttggtccgataatcccaacacgctgcggcttgcggacattaaatgaaagcggcccagcaaggatctgttcatcgtagccaacttttgcctgctccacatcaagaacttcatttccgctatctttttcagaatggaattgaaaatggattgatttatcatcagtttctggacgctcaagccgctccattttttctaattgctttcgccgcgcctgagcacgtttagttgttgaggcacgaacaatatttcggttaacaaagtcttctaacttagcaatctttttttgttgttggtcatagtgtttccactctgcttctaatcgttcttgcttgtgtttaacaaattgcgtgtagttaccagtatagtgggtgagtgttttattatcgagatcataaacatcgttgacaacacgatctaagaagtaacggtcgtgagagacgataagcaatgcaccttgataacttttaagataatcttctaaccatgaaagaacgttcatgtcgaggtggttagtcggttcatctagaatcaaaagccccggtgcttgcagaaggatctttgctaaggcgagtttagttttttgccctcctgaaagggaattaattggcgtatcataactatcttcgccaaaaccaaatccatgtagaattccccgcatacgtgattcgtattcgaaaccaccctgtttcttaaaggcagcttgtaaattatcgtatgttgaaagaatttgttgataattgctatcggaactatcaaggtcagcgaactgttgttcaagatcgtggatttgcgtttccattttgtggagaggagcaaagacagtatctagttcagtccaaatgctattttgactatcgagtccttgatcctgggccaagtaaccaattgtcaaatctttaaccttcgtaattgttccttcatctggttcggtgattccagcgatcatttttaacaaggtcgttttaccagcaccattacgcccaacaagcgcagtacggccatgctcttggatttgcatgttcatattgtgaaataaaacgtccgcgccaaatcgacgcacaacgtcatttgtctgtaaaagtaacatattgaaacctcatttaattcgttgatttaatatggttttattttagcagatttttaattttaaataaaaatttgaaaatatttttgtattttagttcacaaaaaagggtttaattgctagaatatactcagacttaaatttcacaaagtaaaaattagtaacattatccttgtcaaaaacttagtaattagttggcaaactaggttgagaagggcttgttttaggaggaacaaaagtagaatggctaataaaaagattccacgcgcgactgcgaaacggttaccaatatatttccgttatttaaatgtattgaaagacgcaaataagcaacgggtatcatcaactgaactttcggaggctgtgcaagttgattcggcaacgattcgtcgtgacttttcatattttggtgaattaggtaagcggggatacggttatgacgttgaaagtctattaaagttttttaaaggaatcttacaccaagactcattagttagtgttgccttagttggagttggtagtttgggaagtgccttgttaaactttaatttccaccaagataccaatttacggatcagtgcggcatttgatactaagccagaatatgccaatacagtcaaaagcggtattccaatttacccatccgaggatatggtaaagcagttaaaagagcaacagattgatgttgttattctaaccgttccaggaatcaaggcccaacatgttgcggaccaattagttgaagctggtgtgaagggaattcttaactttactcctgttcgtttatctgtgccaaaaaatgttcaagttcaaaacattgacttaacaaacgaacttcaaacattaatttacttcattaaaaattatactgaagattcaattgaataaattaggagagcattggtttgatgaaagcgtccaaccaatgctttttgtttactaaattattaataaaagtcatggattgtaggtatgatctcttaagttttaaaaaatggtcaaaaaaagtcaaagtatttttgttgcattttaaagagaacatgttatatttaaacatgtggttagcactcgaagagtttgagtgctaaaaataaaatttattaacaagatggagggattaacgtgttaaaaccattaggagatcgcgttgttctaaaagctgaaactgaagaagaaaagacagttggtggaattgtccttgcttccaatgtgaaggaaaagccaactactggaaaggttattgccgttggagaaggtcgtactttagaaaacggacaaaagcttgctccagctgttaaggaaggcgaccgcgtattatttgataagtacgcaggcaacgaagtagaatacaacggtgaaaagttcttagttgttcatgctaaagacttagtagcaatcgttgaatagttaaataagcgaattaagagcaggagacagaaagaatgaaattccttcaccgtctcttttaaataatgaatttaattttgaggtgacataaatggcaaaagaaattaagttttctgaagatgcacggagcgctatgctcagtggtgttgataaattagctgatactgttaagacaacaatgggtccaaagggacggaatgttgttttggaacaaagctacggcacaccaactattactaatgatggtgtaactattgctaagagtattgaacttgaaaaccaatttgaaaatatgggtgcaaagttagtagccgaggttgcttcaaagactaacgatattgccggtgatggtactacaactgctactgttttaacccaagcaattgttaatgctggtatgaagaacgttacctctggtgcaaacccagttggtattcgtcgtggtattgacaaggctaccgaagttgctgttgaagctttgaagaagatgtcacacgatgtaaagaccaaggatgatatcgaacaaattgcttctatttcagctgctaatccagaagttggtaagctaattgctgatgcaatggaaaaggttggccatgatggtgtaattactatcgaagattctcgtggtgttgacactagcgttgatgttgttgaaggaatgagctttgaccgtggttacatgtcacaatacatggtaactgataacgacaagatggaagcggaccttgacaatccatatattttgattactgacaagaagattagtaatatccaagacattttgccattgcttcaatcagttgttcaagaaggccgtgctctcttgatcattgctgatgatattactggtgaagcattaccaactcttgtattgaacaagattcgtggtacctttaatgttgttgctgttaaggctcctggctttggtgaccgtcgtaaggctcaacttcaagatattgctgttttgactggcggtactgttatttctgacgaccttgggatgagtcttaaggacgctactgttgatcaattaggtcaagcaaacaaggttacagttacaaaggatactactactatcgttgatggtgctggttcaaaggaagctatccaagaacgtgttgaccaaattaagcaagaaattgctaagtcaacttccgactttgacaaggaaaagcttcaagaacgtcttgcaaagctttcgggtggggttgccgttgttaaggttggtgccgcaactgaaactgaattgaaggaaaagaagtaccggattgaagatgccttgaacgctactcgtgctgctgttcaagaaggatttgttcctggtggtggaactgctttaattaacgtaattcctgctcttgacaagattgaagccgatggtgatgaattaactggtatcaatattgttaaggctgcccttgaagcaccagttcgtcaaattgctgaaaacgctggtgttgaaggctctgttattgttaatgaattaaagaacgaaaaagaaggtattggttacaacgctgcagatggcaagtttgaagatatgatcaaggctggtattgttgacccaacaatggttacccgttctgctcttcaaaacgctgcttccgtatcagcattgcttcttactactgaagcggttgttgctgataagccagatccaaatgctaataaccaagctcctgctgctccacaaggcggcatgggcggtatgatgtaataccatttgactaaaatttaattttgtgggcagaaaagattctaatgtttgttttttcaaatgttgggatctttttttattggaggaaaatcaatgacgaaaaatgcaaccagtgtctataactatttagacaacgaaaaaataaactatcaaattgttactcatcccccagtctatacagcggaacaagcagacaagtatgttcaagaatatcaatttgcccgtacgaaaaccctttttctaaaaaataaagctggctattatttagttacaatcttagaaaataagcgtctcaatatgaaaaaattgaaagagaatctatcgactagtcggttttcatttgcccacccagaagaattagctatgaagttaggaataacaagtggggctgtttcaccctttaacttgtttaatgataaacaacatcaggttacctttattattgatgctgatatctttaagaacgaggagttaatagggtgtcacccaaatattaatacggccacagtgattttgagaacaaaagatttgcttcaaataataaagttgaatggtaattcagttaaggcggttcaactataaagttaatctaaaaatcttaaattgtggtaaagtaaattagtattaatttttaaccaaactataactgaaaggaactaagaaatggaaaaaatgaaattccagaagataacgctattttctggtgtaatgcttgccttaaattccttaattggttcagggtggttgtttggtgccggaactgctgcaaaggttgccggaccagctgctattttgtcatggatcttaggagcaataatcattattagcattgcccttacttatgttgaattaggggcaatgtttccagaaagcgggggaatgagtcgttatgctcagtatagccacggtccgtttttaggctttattgctgcatgggcaaattggatttcattaatcactttagtcccaatggaagcagtggcctcggttcaatatatgagctcgtggccgtgggcatgggcaaattggactcaccactttatgaaaaacggtaatattacgactcctggattgttagttgtatttggctttatgctggtttttactttgatcaatttctggtcggtaaaattgatgactcgctttactaacttaatatcaatttttaagattttattaccgacactaacaattgtgatgcttattgcggcgggttttcatcctagtaattttggtcatagcgtaactacttttataccatatggtagccggtcaatctttgaagcagctgctatttctggaattattatgtcttatgatgcctttcaaacggtaatcaacatgggaggagaaatgattaatcctcataaaaatatcgtgcgaggcgtattgatttcaatgattattaccgctgtgatctatgtcatgttacaagttgcctttattggagcgattgatccgaatttattagcgcaaaaaggatggcatgggattaactatacgtctccatttgctgatattgcgatcctgctggggatgaattggcttgcaattttgctatatatggatgcttttgtttcaccatttgggacaggggttgcgttcgtggcgactgcctcacgagcattggcagcaatgactcatactggacatttgcctcaatggttgggacggctagaacggcgctacatgattccgcggcttgcaatggttgtggatctaattttagcggtggtaatggttagtctcttcagaaattggagtttgttagccactgtaattaccggttcaaccttaattgcttatcttaccgggccagttactgtaatgtcgcttcgcaaaatggatgctaatttaaagcggccgtttcatccgcattttatgtcctggttggcgccatttgcatttgtcttgacgagcctttcaatttattggacaatgtggccgacgactgttcaggtaattggggttatcttattaggcttaccaatttatctttattatgaagttaagtatcgtcacgcatcagggctacgtgacttacgcaatagttattggatgttggtttatcttgtttttatctcaatagtttcttacattgggagtgaaggatttggcggcaaggactggttgaagtacccatgggattttgttgttattatcatctgctcgctaggattttaccggtgggctgtggctagccggatgaaaaaagtcgatcctgcggcagaaaaggttaatgccaaggtaaagatgccaggaaaagatcaatagatatatttgtaggttgcaaaattaaagaataaattgtaatattgtcacctacttaaaaagtgtaaaaatcaaaggagaaatagtatgtggcgctatttgaaacgtgttttaatcgggaaaccgttaaaaacccttgatgaagggcaaacacacttaactaaatttaaagcattagccatgctttcttctgacgcaatatcgtcagtagcatatggaccagagcaaattacaactgttctggtaactttatccgcagcagcaatctggtattcaatcccgattgcggcagttgtgttggtccttttgttagctatcacgttatcataccaacaaatcattcatgcctatcctagtggtggtggtgcttatgtcgttgccacacggaattgggggagtaatgggggattatttgctggaggatcattactagttgactatatgttaacggtggctgtttcaacgacatctggagttgaagcgattacttcggcagttcctgctttatataaattttcaattccaatcggaatcgttattgtccttttaatcatgtttatgaatttacggggaatgagtgaaagtgcaaacttccttacaattccggtatatttctttgttattatgatgattgtgatggtagtgtggggtggctataatattgccactggtcatattcattaccgggcaattgttgattatggaacaccggtatcgggaatgtcatttgttttgcttattcggtcattctcagctggttcgtcatccttaactggggtggaagccgtaagtaatgctgttcctaactttaataagcctaaagaaaagaatgcatcaactaccctggcaattatgagtgctattttagcgttcttctttattgccattatcttctttagtttttatctgggggtagttcctaattcacggacaacaatcctctcccaaatggccgcacaaatctttggtgggcatgggctaggcttttacctcttgcaactttcaactgcaatgattttagcggtcgctgctaatactggtttctcagcctttccaattcttgcctttaatatggccaaagataaatatatgccgcacgcgttcatggatcgtggggatcggttaggttactctaacgggattatttccttggcgattggagcaattattttgatcttgatcttccatggtcagactaatatgttaattccgctttatgcagtaggggtatttgttccatttactttatcgcaatctgggatgattattcactggtttagagaacgggaaggtttctggttagggaaagcctttattaacctagtaggagccttgatttcatttgttcttgtcatttgtttgttctggcaacactttgcaaatgtttggccatacttaattatcatgccgctgcttttatggatgttccattcgattcaccggcactatgtaaaagtagccgctcagttgcgggttactgaaaagacgaaagttcaattacatgattacgatggtgcaacggtgattgttttagttggtaatgtaacccgggtaactcgtggtgcaattaattacgctcggtcgattggtgattatgttattgccatgcatgtttcgtttgatgaaaatccaggcaaagagcataaaacagcaaatgaatttaaagctgaatatccagatgtccgttttgttgatattcactcttcgtaccgttcaatcgcaaaaccaacgttacgttttgttgatgtgattgcaaaacgagcagaagcaagaaattattcgacgactgttcttgttccgcaatttattcctaaacatccatggcaattggccttacataatcagaccagtgttcgtttacgggcgttattgaattcccgagagaatattattgttgctagttataactatcatcttcaagaatagtttatttagagagaaagtattgatttaatgaataaaaagcaactattatgggggcttttgtttgcagttggccttttcatggcggcaagttataccattgataatcgtggctttcattctggaatatacggtatcattggctgtgctttgatcttaatcgcgtatgcgggaatgaattgggaaaaactgcaatcaaaagatcaacatacgagaaaaattttagtgcttttgagcagtattttagggattatcattgtccttgatattgctgaaatgattttaggataattaaataaagcttattgagggagcgagacagaagtcacttgtgacttcgtttttcgacgcgaagctagcctctgggagcccccgcaagcaacagtaggcctccaatgttcggttttgtcggacgttggaggccattgttgtactgcgtatttgctttttatgaaagtaacttaacttatgtcacagtcctttttatattaactaataagctaaatcatattatcctttttgctagtcggctaacaaaaaggagagatgaaaattgctaataggtcgtctagtaaaacaagctaacaatgcgatgaatcaagaaatgaatgcatttgcgcagcagtatggattgacaggaacgcaaatgtcgattattgattttttaacgcatttcccgggaaatagttgtgatcaacaccagattgaaaatgaatttggaataaagagatcaaccactactgtattacttcaacgaatggcaaagaaaaatttaattgaatgttatccgtcaccagaagatcgccgtcaaaaaatcgttacgcttactgcagaaggccaaaaattatcttcagatgtaagtgcgtatattacacaatacgaagagaaattaaaagcagattttagtgaacaggacatttcgaaaataagacgattcttatcaacgatgatagaggagaaataatgagtacgaatactgaaaaaatttcggcaaaagttgttgcagcgattgtggcaaccggattgatgtcattttgtggggtaattgtagagacagcgatgaatgtgacttttccgatcctgatgcgtgaattttcgattactactaatcaggcccaatggatgacttccatttatttgctcttggttgcaatcgttgttcccttatcggcaattttgaaaagctcttaccgaacaaagatgctttttacagttgcaaacttgctttttatcagtggaataattattgatgcactggcgccattatttggggtgcttttagttggtcgtacaattcaaggaataggaactgggattgcattaccattgatgtttaatattattatggagcaagttccaacaagcagaattggctttatgatggggagtggaaatcttattactggagttgccccagcgattggtcctacttttggtggaatcgttgccagcaagcttaattggcggtgggtattttattcattaattccgcttttaattatttcgtttgtgcttggtgaatggggaattacccaaaaatcaccgattaaaaagcaacaaattgatctttttagtatattaatgattgtattcatgttctgtggttttgtaacagaatttagtaacctgggaagccaagccttcatgaccttttcagttggtagtgcattgttaatcgggatcttaggaatgggactttttgctcggcgttcattaaccctaaaagaaccaattttacaattacgattatttagaaataaaaaattttctgggcatattcttggtttctttttaacccaacttatttcgttaggctttgcatttcttttaccaaactatattcaattggtaaatggtaatagtgcaatgacagctggcttgattgtccttccggctggttttgtgggtgcgatatttgccccattgggaggaggattttagataaatttggcgctcgcaagcctattttgattgggacttcattatgtctaattgcgcttattgcttttacaatctatggatagcatttaacaaatatatttattgcgcttgtttatattctctatatgggtggaatgggaatgtgcatgggttgcgtaatgacaagtgcattaactgttgttggtaaagcaaagcaatcacaaggaaatgcgatccttaatactttgcagcaatttgccggggcaattgggacctcattagtagcgatgattgttgcagccagtcagagtcatctccacacgactagacgtatctctacggcaattggtactcaagaagcttttggcatgttaacgattttttgtattataatttggataagttactatcgaagtgtgaaaaaataaaatatggtggattatagaatgaagttagccacccagttggtggtaaataaaaaacgccattcggcgtgacatcaggtatcatattaagtgaaccaaacctatatgaaaggatgtccgtcaaatgacgcacttaaatgataccatgtctactagtttattgactactcataaaaagaatgctcatcttactaaagaagaacgtgtgatgattgcgactttaaagtcgcaaggactttccaatcgcgcaattggtcgccaattaggagttaattatcaaacaattaataacgagctcaaccgtggtacggtccgccagcttcgtcgtcaaaaatctaatggtaagatttacgaatattcttactacatctatagttatgaagctggtcaggccacatatcttgaacatcaccgccattctggtcgtcgttgcttatgttattcttcaaagcaatttttacgattagctgatcagctaatgcttggtgagtttgacgaccaacattactccccacaagcggttatttataaggctcaagatttaatgaatgatggcaccctgatcccaaagtcggttgtaactttatatcaatggattaatgagggtgtgcttcgtacgtctaatttagacctctttgaaaaacctaaacgtaagcatcgtcgaactcatccgcaagctaaaaggtgcttagggcctaatattgctcaacgacctcaaactgcggaccaacggtccgaaattggccattgggaactagatacagttcagggacagaaaaacggtaatgacagtgttgtactagtaatgactgatcgcctttcacgagttaatatcacgagtaaaattgctggtaaaactgcgcatgcagtaaatcaattctttataaatttacgccagaaaatgggcacagatgcttactatcgcatctttaagacaataacctctgacaacggttcagaatttagtgagttaacacaagttcacgatcatgttttctatgctgatccgtattccccttgggaacgtgaatccaatgagatcaataaccggtttctccgcaaggagattaccaaaggtgaagctataaataactatagtagtgctcagatcatagcgactaatgattggatgaatcactatccacgagctatgtttaatggacattcgtcaatggatatctatcgtaaggccttctaccaagagatatcacagctccatcaaccaataatcaattggtcagtattatttatttgagtccagtggctaacttattcttgaaatttaggaaaaataaaatattaaaaaattcaggctagaaaattctaacctgaattttttaatatggaatttcgttaaatcgctgatcgccctcagttatttgaagctggtcgttaaaacgattaatgagcttttctttgacatcttttaagtccgtttcgtttacataaatacttgtttcaacattaaccccgtactcctcactagcaacctcaagattgttctccttgaggtagtaaagaaggagatcgtgaagagcataggtaacagtgatttttagaatttcttgcttgatccgttggacgagaccagcctggtggattgcttcagtagttgtattgctatatgcccggatgagaccacctgcgcctagcttaatcccgccgaaataacgggtaaccactgctacgacattgtggatctttgcaagtttaagcgattcaaggatcggaattcccgcagttccgcttggctcgccattatcactttctcgctggatctggtcgttgtcaccaatcatgtatgcaaaacaattgtgagtagcttttttattagctgcttgaatactggcaataaactgttgagcttcttcatctgaggagacacgggcaatggagcaaataaatcgtgattttttaattatttgctcataagtagtgtttttggcaattgttaaatatggttctgtcatttttaaacttccttcgtgctattttaattagtttacgtatatataaagtaggaggtgaataatggatctagaaaattattatgggagacgagtcttggcttcgcgtcatgaggtgaaacaatcaggaattcaagaactgccaacaatcagaattgacgctggtaatatcagatgctatcgctgcaatcatgtcacggcaaaatcgctgggcgctttgccacaaggcgagttctattgtccgcattgtattaatcttggacgcgtttcaacgttaaataaattttatcatgttccagagccaaatcaatttacggttaccgaaccggtattaacctggaaagggaaattgtcgcctcttcagcaacaagcttcagaaaaaatttcccggggaatggctgaccatgtccaacaattattatgggcagttacaggtgctggaaagactgagatgatgtttgcaggtattgcggcagctattgaacgtggtgagagaattggaatagcttctccacgagtagatgtttgtttagaattatttccccgtttaaaagctgcctttgctaattgtgatattgctcttttgcatggtcgacaagaattaccttatcattatgcccaactgactatttgcacaacccatcaattgcttcgtttctatcatgcttttgataatttaattattgatgaagtagatgcctttccgtatgctgctaatgcttcgttattatatgcgactaagcaagcaataaaagagaacggagggtgtctttacttaactgcgaccccaggtgatgctttgctgcgagaaattaaaagtaaacgattagttgttaattatttgcctcttcgttatcatgggcatttacttccacaaataaaagttagactagcttttggatggcggcgacgattagaacgtcagcaattacccccgcaagttattcaacagttgcaggaaacgctaaaggaaggccatcactttttgctatttgttcctcatattgcagatttagcattggttgaagctgcattacggcattcttttacaactttccgctttgctactgttcatgcaagtgatctagaacgattagaaaaagtccaaaaaatgcgtgatggtgattacgactttttagttacgacttctattcttgaacggggagtcacttttccagaaattgatgtctatgttttgggtgccgatgatccagttttttcctcctcggcattagtgcaaattgctggtcgagctggacgttcgcaaagtcgaccaactgggcgggttattttttggatcaattgtaattgtcgacaagttaatcaagctgtttcccaggtgaagtacttgaatcggaaaggtcaaaggttaatagatggagtgtcttttgtgcaataaagggatatctttccaactaactttgaaagatatttttagctttcgcgaaattatcacgccagtagtctgcactaaatgcaaagaaagttttgtgcgctgggatgatcacggatgtgcaggatgcggtaaagaaaatgttaataaaaatggtttcttatgtgcagactgtcagacttggaagaaactttatggttggtacttgcatcatcgaggattatatcggtataacgaggcgatgaaagaatatatgcaacgttataaatttaatggcgattatcgtttatgcgtggtatttcagcgtgaacttagcaaagtggttaatgaacagaaagcagatttaattgtcccgattccagtaacgtcgacaacgatgcaaacgcgtggctttaatcaggttattggtctattatgcgaagtaccttaccaatcgatcttacgaactaagataagttcaaaagtggcacaatcaagcaagacaaaggaagagcgacttgcaactaaacagccattcatacttgatgcaccagaaaaagtaattaataaaaaggttcttttagttgatgatgtttatactacaggaaggacactgtatcatgcggcaaacctttttaagcaagctggctgtaaagagattggtagcgtttcactagcacgttaaattcttcttaaaatgtattaataaaatttgttaattaacacaaactaatctataataaaaataggatatgagaagagtggtccttctgatatcagatcaagcaattgcttggctgaaaggagagaagtacaatgttaaagttcaatattcgtggtgaaaatgtcgaagttactgagtcaattcgtgattacgttgtaaagcgaattagcaagcttcaaaagttctttgaagatagtgttgaagctaccgcccacgtgaacttaaaagtttatccaaaccggacgtataaggttgaagtaacaattccacttccatacctaacgttgcgggcagaagagacttctaatgatatgtatggaagtattgacttagttactgataagcttgaacggcaaatccggaagtacaagacgaaggttaaccgtaagtcacgtgaaaagggcttaaagaaccttgaattcatcccatctgataatgatggaacagatggacaagatgatgaattaaagattgtacggacgaagcaagtttcattaaagccaatggatcctgaagaagctgtccttcaaatggatatgcttggacacaatttctttatcttccaagatgctgaaactaatggtacaagcattgtttaccgtcgtaatgatggtcgttatggcttgattgaagctgaatagtcaatgccaatatgaagagcgcggatgagaaatcattggcgctttttgtatcttataacttatagccaccttgtaatatccatactaataatttttatttatactatgaacgtggtaaaatattatggttagagtaaaaaacataattggcttgagtagtacttttttattgattttggacttaagccagaaagtaggaaggacgcttttatggccaatattctaaaaaaatggattgaaagcgatcgtcgtgaattacggcgaattaacaaaatagcaaataaagtcgagagttatgctaaacaaatgtctgaactaactgatgaacagcttcaggcaaaaactgatgaatttcgggaacgttataaaaagggtgaatccttggatcatatgttgccagaagcattcgcagtttctcgtgaaggggctaagcgggtcctaggactttacccattccatgtccaaatcatgggagggattgttctccacgaaggtaatattgcagaaatgcggactggtgaaggtaagacattaactgccacaatgccggtttaccttaatgcaatctcgggaaaaggtgttcatgttattactgttaatgaatacttgtcaaagcgtgatgctactgaaatgggacagctttataattggcttggatgttctgttggtattaacaactcagagatgagccctgatcaaaaacgagaagcatataaagctgatattatgtattccactaatagtgaaattggatttgattaccttcgtgataacatggctgtttacaaagaagaccaagtccaacgtggtttaaactatgctttagttgatgaagtggattcaattttaattgatgaagcgcggacaccattaatcatttcaggtccaggaacgggcacttctaagttgtacaagcaaactgatcggtttgttaagcaattaaagaaagatgttgattataagattgatcttgaatcgaagacagtttcattaactgatgaaggaattaaaaaagctgaaaaatacttcaacttaaagaacctatatgatccagaaaatactgcgctgacccaccacttggatcaagcgttgcgtgctaactacatcatgcttttggataaagattatgtggttcaagatggtgaagtattaattgttgattcctttactggacgtgtaatggaaggtcgacgtttctctgatggtcttcaccaagctattgaagccaaagaaggcgtagagattcaagaagaaaacaagacaatggctaacattacataccagaacttatttcggatgtataacaaactggcggggatgactggtactgctaaaactgaacaagaagaatttcgtgaaatttacaacatggaaactattactatcccaactaaccgtccagttcagcgaaaagatgagcccgatttgctttacccaacgttacaaagtaagtttgtagctgttgtcgatcggattaaaaaacttcatgctaaagggcaaccaatcctagttgggacagtcgccgttgaaacctctgaatacttatcccaactgcttgataaagagaatattccgcatgttgtcttaaacgctaagaatcacgctaaggaagcggaaattgttaaaaatgccggtcaaaagggtgcagtaactatcgctaccaacatggcgggacggggaacagatattaagttaggccctggcgttcgtgaaattggcggactagcagttattggtactgaacgacatgaatcacggcggattgataatcagcttcgtggacgttctggacgacagggtgatccgggattatcacaattctacctatcgcttgaagatgatttaatgaagcgatttggtggagaccggatcaaagccttcttggagcggatgaaagttaatgatgaagatgctgtcattaaaagtcgtttcttgactcaccaggttgaatcagcacaaaagcgagttgaaggtaacaactacgattcacggaagaatgttcttcaatatgatgatgttatgcgtgaacagcgtgaaatcatttataaagagcgacaacaaattatcactgaagataagtcgctgaagtgggttcttatgccaatgtttagacggacaatccagcgtgaagttgatcaacatactcttggtgacaagaaggattgggatttacaaggaattgttgactttgcagaagaagtcttaatcaagcctgataccatcacagttaaggatctagaaggtaaatcacctcaagaaatggtagattacttgatgacatttgcccagggagtttataaggaaaagcaaaaacaactttatgatccagcacaaatgcttgaatttgaaaaggttgttattttgcgggtggttgactcacactggactgatcacattgatatcatggaccaattccggcagtcagttggtttacgtggatatggacaattaaatccattggttgaataccaaactgctggttatcacatgtttgaacaaatgattgctgatattgagtatgaaactactcgactcttcatgaagtcagaaattcggcaaaatgtaacacgttaattgttaattactactaggtacggcagtaaggtaacccatggcggtaccgctgccgtattgttgtataacggaggttcgattgtggaattaaatgaagcaaaaaaacaagtagaatcaatgcaaaaagaagttacgcacttcgggaggtctctttgacttagatgcactagatgagcgcattgcagaaattgaacaagagatggctcaaccagacttttggaatgataatgagcaggcacagaaggtcattgcggaaaataatattttaaaagaaaaacgggatacttttgtgaatttacgtgatcagattagcgatcttgaaacgtcgcttgaattgctcgcggttgaaccggacgatgatttacaaaaagatttcgaagcatcatttacaaatacacaaaaggctttagaacagtatcgcttaacgcaacttcttgatggggagtatgacgctaagaatgctatcttagaaattcatccgggagcaggtggtactgaagcccaagattggggtgaaatgcttctgcggatgtatattcgttggggtgaacagcatgctttctccgttgaaacagcgagttatgaagccggtgatgaagcgggtatcaagagtgttacgctgctaattaaagggcataatgcgtttggttatcttcgtagtgaaaagggagtccatcggcttgttcgtatttccccatttgatgcggctggtcggcgtcatacatcatttgcttcggttgacgtaatgccggagttggatgatagtgttgaggttgatattgatccatcagatttacgagttgatactttccggtctagtggtgctggtggtcaacatattaataaaacagaatctgctgttcggattacgcatattccaaccgggattgtaacctcttctcaagctgaacgatcccaacttcaaaaccgagttactgcaatgaatatgttaaaatcaaagttgtatgaactagaagaagaaaagaaagctaaaaagcgggcggaaattgagggcgaacaacttgatatcggttggggttctcaaattcgttcatatgtttttcatccatacactctagtcaaagataatcgaacaggttatgaaacccataatggacaagctgtaatggacggggaccttgatccatttattgatgctttcctacagtggaaacttagtcaaaagaatcctcaataagttatttagtttggaaggaagtgagtaaagtgcgcgaaagtcaacataaaagattaactcgctcaggatcagatcgaatgatagctggtgtatttggtggaattggccagtactttaagattcagccaaatattttacgtactttatatgtcttactgactatttttaccggttttgttccaggcattattatctatattattttgataataataatgcctgctgatccgcaaaatcccgatttactaggatttttaaagtctttcagtgaatcacaaaaaacatctcaacagcctcaccaacgttctcggcggactttaacgaatgtcgaggaaaaagacattaaaagaaatggaagatcatgatggaattttggaaaagagtattgattgatacaatcctttttattgcccttgctggtttatttgccggaacagggatgttttatattacaagtgcttggattgcaccattggcaagctttgttttagcaattttgaacgttgctattaagccaattttagtaattttatcgttgccgattaatattttgaccctgggcctttttagtgttgtaattaatggaattatgctacaactaacatcgatgcttgtcgggtcggcaaactttcatttttcgtcatttggttctgcaatgttgattgcgattattatggcaattttcaatgcagttattacaagtcacgaggatagattgtaaaggagtggagaaaatgccaaacaatgtaacggtgcaagaattagttgataaggtccggttgaaagtcttacaaggagaagattacctccaacgtaagataacaactagtgacatttcacggccagcacttgaatttgcgggatattttaagcattaccccgcagcacggattcagctgttaggaatcaccgaaacctcatttgctaaagacttaactcatgagcaacgtgaagagtacatgacaaaaatgtgtatgccacaaacaccatgttttgttatctcaactaatctgccaattcctaaggagctaaagaaggcggcggaagatgcaaaaattccaatcttaggaacgcatttaacctcttcccaaatattaagtaacatgacttcttacttgcttgaacgtttggcaccacgaaaatctctccacggtgtattagttgatatcagtggggttggagtactcattactggtgattcgggagtgggtaagagtgagaccgcgttggaacttgttcgtcgtgggcaccgactgattgctgatgatcgggtagaagtttacgctcgtgacgaacagaccttggtagggactgctccgcaaattttaaaacacttaatggaaattcgtgggattgggattattgatgtctctacgctttatggaacaggagcaattatgccttctgatcaaatcagtttaattgtacatcttgaaacgtggactccagatgtacagtttgatcgtcttggtgatcgtggagatactcaaataattcaaggcgttattgtgcctaaagtttctgtcccggttaaaactggtcgtaatttagcgattattattgaatcagctgcaatgaattatcgggccgagacaatgggctatgatgcgactgaaacatttgatcgaaaccttaaccagttgattaagcagaattcagaacgtgatagtaaaaataacaaggggtcggcaaactagatgattaatccaggaataaaagccgctttaaacccaattgctttccaagctggtccatttactattcactggtatggcgtcattattgctagcggggtagttttggctctcttgttagccgttcgcgaaggaaagcgagaaggaatttctgaagatgatttttatgattatcttttatgggcgctcccaattgcgataatttgcgcacgaatttactatgtagtatttcagtggagctattattctcagcatccaagtgagattattgctatctgggatggtggaattgcgatatatggagcgattttaggaggctttattgttttacttgtcttttgccattaccgtcatttatctagttggctgatgatggacatcattgccccaacccttattatggctcaaggaattggccggtggggtaactttatgaatcaagaggcatttggtgatattacgacacgggcgcatttaatggctcagcatattccaaattggataataaaccaaatgtatattggtggtcactatcgaattccaacgttcttatatgagtcactatgggatttaactggctttgcattactaatgttacttcgtcatcgcaaacatttatttcgtcgtggtgaaattttcttaacctatgtaatgtggtatgcatttggacgtttctttattgaaggtatgcggactgatagtttaatgctcggaaatattcgcatttcacagttactttctgtagtgttttttgttagtgcattagtaatactaatagttcaacgtcataaaaacattccgtggtatgataacggaataaacaaaaattaattgaattggataaggagaaagaattatggcagaaaaaattgctgttttaggtgctggttcatggggcagtgttttagcaaacatgcttacagaaaatggtcacgatgttacattatggtctcgtaatgaggaacaagttaagcaattaaatactgaacatacaaatcctcgctatatgaaagattttgtttattctactaaattaacagcaacaacagacatgaaaaaatctgttaagggtgccagcgtgatactgattgtgattccaacaaagggtcttcgtgaggttgctaagaaattaaacacaattttgactgaattacaccaaaaaccgttaattattcacgcaacaaaaggcctagaacaaaatacatataagcggccatcagaaatgcttagtgaagatatttctcctgaaaatcgtcaggcaattgttgttttatcaggtccgagtcatgctgaagatgtggcaattaaagatatgacagctgtaactgcagcttgtgaggacctaactagtgctaaaaaggcgcagaagttatttagtaattcttatttccgtgtttatactaacgacgatgtaattggtgcggaatttggagcagccttaaagaatattattgcaattggtgctggagctatccaaggccttggctaccatgataatgcacgagcagctttgattactcgtgggcttgcagaaattcgtcggctgggggttgcttttggtgctaacccaatgacttttattggtctttctggtgttggtgaccttgttgttactgctaccagtaaaaattctcgaaattggcgtgctggctatcaattgggacaaggaaaaaagcttcaagatgtaattgataatatgggaatggttatcgagggggtctataccactaaggccgcttatgaattaagtcgtaaacggcaagtacagatgccaattaccgaagctctttaccgtgttttgtatgaaggtgaagatatcaaaactgcaatttctcagttaatggaccgagatcttacttcagaaaacgaataaatatggtaaaatactagaggatggatattgagagaaattgaaacatggaaagggttttacaagtatgaaacgtgttagaaaagccattattcctgctgctggtttaggaactcgttttcttcctgcaacaaaggcattggcaaaggaaatgttaccaattgttgataagccaacaattcaatttattgttgaagaagcgcgcaaatcaggaattgaagatattgttgttgttgatggaaagaataagcggtctattgaagaccactttgactctaatccagagctggaagataatcttcgttcaaagcacaaggacgagatgttaaagatggttgaagaaacaactgatgttaatatttacttcattcgtcaatctcacccacgtggtttaggggacgctgttttaactgctcgtgattttatcggggatgaaccgtttgttgttatgcttggggatgaccttaataacattaacaacaagaatgaagctttaacgaagcaattaattgaaagttataaccaaactggcgcatctactcttgcagttatgcgggttccacatgaagatactgcaaagtatggtgtaattaaccctagcaaggaagttacgccagggctttataacgtaactagcttcgttgaaaaaccagctcctaaagacgcaccaagtgatttagcaattattggtcggtatgtctttactccagaaatctttgatgtattagcaaagactaagccaggtaagggcggcgaaattcaattaactgatgcaattgatactttgaaccaaactcaacgggtattcgctcgtgaatacaagggtgaccgttacgatgttggtaataagttcggctgggttaagacaaacattgaatatggtttggaacacccacaagttaaagaagaattgcgtgaatacattaaggaattaggcgcaaagcttgctgctgaagataagcaaaataattctaagaagtaagactagcattggcctgtaaaaaataaaccttcaagattcgttatagggatcttgaaggtttattttttacatatcttcaacaactacatattccatatcaagtgggccgtgaacaccaacgattaacaccatttcaatatcaccagaattggatgggccggtaataaagttgatgtttgatgtttgtaaactaccatcctgaattgccttttgataataatccattgcttgccgtgaacgtggtaaaattttgctttttggcacaatagctaggtaatgagttggaagaaaatgaaacatccgtccttgttgtgggtaggtcgcaactgttacggtccctgactcagctaatagaaagtccgcaaagccaattgctccatcactgttatttgcatttacaatgttttgccgcccaaattcaggttcccaatagtaaataggatctactcgtaaattatcttgccatttccccaatgaataatcttgccatttttcttcatcaaaggagggaagcattaaacttttaatctccttttcttggataaaatcattaagagtgtggccaagatcggctgatttaacaacatggaaatcaacatgaacttcttcgctatttttgcgtgcaagttcaagaagttcatcttggctttttccagcaagggtagtttctggaagattattaacggggacaaatggattttcaccaagcgtatggcgaggacgattggcagcctttgcaattcgatttaagaagtcttcttgatttttagcggtgtttgcttcttgtaagtaatcagtcattttcttgctcctcctcttcttcgtaatgacgataccaatgccggaagttttggtggtactttggtggaacagcaagatcacgaacatctacccagccatgagctagtttaggagcaattgcgggaaggtggttaattttaccatctggataaaggttcttaatgtctttaggagttgtcttcttgccaaatggctcaagagcaatatgagcaaatcgcattgcatcattaaaaagcgtaggggagctcgtacctttaccaactgccttcaaaagagcattcgaaggactgtgatctaaatgaagttcatccatttctacataacggtgatgacggattaactcatgaaggggaattttaacaggacaagtttccgtgcaagcagcacataaactacatgcatatggcaattccttgaattcttgataaccgcctaaaatcggcgaaagaacttcacccattggtccaggataaatcgatccatatccctttccaccgacttgccggtaaacggggcaaacgtttaagcaagaaccacaacgaatacattgcagcattggttcaaagtcagtgttaagcatcttagaacgaccattatcgactattacaacatagaagtcatctggtccatctgcttcatccgcttctttaccttttgagaaagtacagtaactagttagtttttgaccaactgcacttcgacataaaacattgtcaaggacttctgcttctttcaaacttggcacaattcgttccatccccatgactacaacctgggttttaggaatggccatactaatatcggcatttccttcgttggtaacaaggttaatcattccattatcagcaatcgcaaagttacagccagtaatgccaaagtctgcttgcataaagtaattacggagatagtgacggacaaacctagccatatgttcaggatcattgtcaccgtcataaccaagcttttcaaatactttttgaatttgattgcggtttttatgcagcgtggggaaaacaatatgtgttggttcatcccaattatcttcttgcaaaataaattcagctaaatctgtttccattaatgaaagtccggggattgtgagtaattctttatccaatccaatttcagtagtcaccattgacttagatttaacaacatgatgaacgtttttcttgattgccaattgtttgataaaggcacttgcttcgttaccatccttggcaaagaaaacatgaccaccatttttttgaacattatcgctgaattcttcaaggtaatccgggagatgcttaatgacgtgttgacgaatttcagcagaaagatcacgccagccttcccagtgtcctaattgacgccgtgcttcagttcgtttttgaaattgagcgtcttgtgctttagcaaccgatgcccgcataaatttatcggcttctgcgtctttaattcgttcagtaaaaggcttatcgcttgtggctattcccatctaaaacaccccgtttccgtttgctggtaccattacatgatccgtatctttgacataagtgattcggctagtatcaacgttatgattaaggacctcagcaatgtgcataattgtaatatgagagccatcacggcgacggttaattcgtccaccaatattcattaaacatgtttgctcgcaagcaataagaatatgtgctttcgtcttcaaaacattatttgctttatcatcaaccatcgcttcagagagaaggggttctttagcagagaatgttccaccaaagccacaacataattgaatgttatgaaggggaataagctcaagtcctttaacatgttcaagtagaacgatgggggctgtccgttcaccaagaagacgggtcatgtggcaagaacggtgaaaggttgctgtatcatctagttctgcaccacaatcaagaataccgagaacccggtaaataaattgcgttagttcaaaagatttatcataaaggatttgcgctttcttcgaatactctggatcatctttgaaaatgttcttgtattcatgaagcatggcaacacatgatccagaaggcccaacaatataatcggcgtcaatacttaaaagggcatcgagttgatttttaaatgtagtaattgtttcacgatcataaccgctattataagttggttgtccgcagcaaatttgtttatcggggaaaaatgtttcgcagccaaaacgttggagaagttcaaccgttgcctttccgacatctggataaagcagatcaacaatacaagtagaaaaaatacagactttcatacatgcgtgcattaattggatgcacttcgcctccttaaaaatcgaaaaaatataattgcttatcataataagtataactcaaatatgataatattagagttgaaaacgatttaattatttgaaactaatatataaaatcataatattgattatagttcgacaagaatattactattaaaaagtaagcaaaatgatagacaaaaagatccaaagtctgtatgatatggatagtaaaaaaattgttcgaggaggaagagagaaatggctgaaaataagcaatatgatgttgtaatcatcggtgctgggccaggtggaatgaccgcagcgatgtatgcatcacgagcaaacctatctgtcttgatgcttgatcgtggaatttacggcggaaacttgaataatactgctgaaattgaaaattacacaggattcaagagtgtgaagggtcctgaacttgcccaacaaatgtatgaaggtgcaactcagtttggcgcagaatatgcttatggaacagtaactaaagtagaacttgatggtgacttaaagaagatcactactgacatggatgaaacatatactgcaaaggcggttgttatcgctactggctctgatcagcgccacctcaatgttccaggagaagaagaatttggtggccgtggtgtttcatactgtgcggtttgtgatggagccttctttaagggaaagcatttaatcgttgttggcggtggtgatgcagctgttgaagagggagtttacttaacgcaattagcctccaaagtaacagtgcttgttcgtcgtgatgagctccgggctgaaccaattattcaagcagaagcgatgaataatgacaagattgagtttgtttataacactagtgtgactgaaattgttggggatgatattaaagtaacaggtgttaaaactcataataataagactggtgaagatggtgaaatggctgcagatggtgtcttcatttatgttggtaatttcccaaagaccgctgcttttaagaatttagatattcttgatgatcaaggctgggtaaagactgatgagcgaatgcggacagcagtaccaggtatttttgccattggggacgttcgtgaaacaccattacgacaggttgcaacagctgttggtgatggagcgattgctggccagcaagtttatcaatacattaaatcgatggattaataaaaaggtgttagagaaaagctctagcatctttttttatttagtggtatagttttgattaaaatttagttagaaaaggagggcgattaccattggaaaatgatgaaaaaataaaactattacagaagttaattcagattgatacagtaaatggtaacgaaaaggacgaagcaagttatattaaaaggaccttagaagatcatcatatttcctgtgaattagttccttttgcacccaaccgcaccaatttaattgcggagattggtgatgaaaaggggccggtactcgctctttctggacatttagatacggtagctgcaggtgatttccaaaaatggacatatccaccatttgctggccaattagtagacggtaaaatctatggtcggggagcagttgatatgaagtcgggattggcagccatggtgggtgctttaattgagcttaaagaagcaggtttgccaaaacatggaaaggttcgcttgattgccactgttgatgaagaagttggtggtcaaggttctcttgaaatgactgataaagggtacgttcatgatgttgatgtgatggtaattggggaagcaactactggccaaattgaatatgctcactgtggctcttttgattatattgttgagtcttatggaaaattggctcatagttcgcaaccagaattgggaattaatgctgttacaaatctagtgaaatttatcaataaagaatcacgggcgtttgacgatgcagcagtaagtcccaccctaggaaaattaattcatagtgtgactgtctttcatggtggagagcagttaaattcaattcctgattacgcatatttgaaggggaatgttcgcacgattccagaatgtgataatcgggaaacaggaaaaagactacaatcaatcattgatgagttaaacaaggagacaggggttgaattaaaactaaagatagttgctagttttatgccagtggttacaaataagcaagatcgcttcattgcacttgctcaaacggcaattaaaaaggttagcggcaggcaaccggatgtagtgatttctcatggggcaacggatgcatcccgctatgttttagacaatcacaattttccaataattgaatacggaccagggattgaaaagttatcacaccaaattgatgaacgtattgcgcttgatgattatttaacggctcagcaagcttacgttgaaattgctaaacaatatttgaataatactaaagacgatgaacaggctagtagttaagcatgaccgtacagagactccagctggtggaaaaggagcttttatgctaatgaatcacacctgggagtaaagattttttgactgaaagaagaatccgggagtcacccgttatcacaaagagtttcgtcgcaaatgactgaacttaatgaggcagttgctgtgaggtagctgtgaaaaaaggtggcaccacgcatactaaatacgtcctttgaagatttattcttcagagggcgtttttttgataaaggagaagatacgtatgaagaaaaagataattaatttcggattagttttaatattgcttttacctttaattgtttttgcaagtggctttaagattcaaaatgagaattaccgggcaaaccacacagatacgtgggaaagaataaagaagcggggaacattacttatcggggttgatgatacctttgttccgatggattttcgaaaaaagaacggtcaattggttggttatgatgttgatttatctcgcgcagttgcgaaagttttaggattaaaagctgattttcagtcaattgattggtcaatgaaggaaaccgaattaaaaaatggcacaattgattgtatttggaacggttatacagctactccttcccgacaaaaacgaattgcatttagcagagtttatgagctatctggccaatcattggtggtacgaaaagatagtaaaattaaaaatttcgcggatatgaaaggaaagacgttgggaattcaagaaagctcaactgctcaaactgattttgacaaatatccccaagtattgaagaaactagttaaaggacagaagccaattctttatcaagataactcgagtgctttcatggatctgcaagcaggccgcacacaaggagtacttgccgggactgtctatgccggctattatgcgacccacattgcaaataataataattataaattgatttcagcatctgcttatcctgcagaccgggttgcgattggaatgaggaagggggaccggacgcttattaataaaattaactatgctcttggggttcttcaaaaagatggtaccttacgacggattaataaaaaatggctaggaattaatagtaattatctgggaccggttgctgaatttcaaaaatccaacaataatcgttaatgatttgttaaaattttatataacaaggactaaggaggttttttaatgggtgcaatcaaatgtaatgatacattagcggtgtcaattcatcggattcgtaattcagatttaaacgaacacgggacagtatacgggggacgaatcttggaattaattgatggtcaagcctcggtagcagcaatgcgagtagctcgaacaacagttgcaacagtatcaatggatgagatccaatttctgcgaccatttgaccttcaagattcaatgtgtatggaggcatacgttaccggctttgggaagcgatcaattgaagtatttacaaaagtaattggtgagcacttgatgaccggtgaacgtttcctcggcttttattgttttatgacttttgtaattcttgatcctgaaaaacaaacggcatttaataaattaattccggaaactgaagagcaaaagacgttaatggcaacatattctcaacgtgttaagcaacggcaaatccagcggcaaaaacagcaagaatttctgcctcatatttcaatttccaagccgtggtaaaactttagtaaatttttaagtaaaaagcgacagatagcattttatgcggtatactaaaaagcagagtatgacataaaggagacattattgtgagctggaaagatacttataaggtttggcaagaacgaacagatcttgaatcagacttaaagcaagaattagctgcaatgagcgacgataaagaaattgaagatgccttttacggtccattatcattcggaactgcaggaatgcggggactaatgggaccaggaattaaccggatgaatgtttacactgtccgtcaagcaactgaaggtttggcaactttaatggattcattgggtgatgatattaaaaaacgaggagtcgctattggttacgattctcggcacaactcccgtaaatttgctcatgatgctgctcgtgtattaggtgctcatgggattaaggtttacatctatgataatttacgcccaacgcctgaattgtcatttgcagttcgtcacatggggacttatgcgggaatcatgattaccgctagtcataaccctaaggaatacaatggttacaagatttacggtgaagatggcggacagatgccacctaaagaatctgacatgatgacaggttacatccgtaagattgatgatatttttgacattgctttagctgatgaacaagaaatgcttgacaatggtttggaaacaatcatgggtgaagatgttgatgctgcataccttgctaatgctaagggtgtaactgttaaccctgaattagccaaggaatacggtaaagatatgaaatttgtctttaccccattatgtggaactggccgaatgcttggtgaacgggcattgcgtcaagctggttttacaaattatgaaatggaaccaactgaagcacaaccaaatggtgatttccctggtttggaacatcctaatccagaattcccagaagcatttgttcgttccattgcccttggcaaaaaagttgatgcagatgtgttgatcgccacggaccctgatgctgaccggcttggatgtgcagttcgtcaaccagatggtgaatatcaattgctaactggtaatcaaattgcttctatcatgcttgcctacattcttgaagcgcataaacaagcgggaaccttaccaaagaatgctgctgcggtaaaatcaattgtttctactaacttcgctgctaagatcgcagaaagttacggcgttgagatgatcaatgttttaactggtttcaagtggatcgctgaccaaattcatcaatatgagactggcaaagctgatcatacctttatgtttggttttgaagaaagttatggttaccttattaagccatttgttcgtgacaaggatgctatccaatccttaactttacttgctgaggttgccgcttattaccgtagtcgtaacatgaccctttacgatggcttacaagaattgtttaagaagtacggctacttccgcgaaaagacaattgctaatacttatgctggtgttgatggcccagctaagattaaggctttaatgaagaagttcagagaagaagccccaactcattttgccggtcatcaagtagtagttactgaagacttcgctaatgggactaaaactacagctgatggcgaagtaagtgaattaggtatcccagaatcaaatgtattgcgttacattcttgatgatgatacttggattgctattcgtccatcgggaactgaaccaaagcttaagttctacattggtacaagtgctgataccttagataaggcaaatgaaaaattagctgatttcgaaaaggctttacaagagtttgctgaataataataactgagagactgttgaaaaaactttgcttttttcaacagtctctgtttttatatacgatattggggatgtcactaagattaaatttttcctcacctttcttgaaatttcgccaaaaaattgtatgattgtacaaattaattattttttgggaggacttcatcgtgggaatgcatgaatatctgaaaagtttaagcgacctcgaaatgattaaccgtgctccaggatattttaaatttgaggaacacaatgtggctgcccattcatttaaagtaacgcaagcagcacaaatgcttggtgatattgaagaacaagccggaaatgaaattgattggcgttctttatatgaaaaagctcttaatcatgactatacagagcgatttattggtgacatcaaaacaccggtaaagtatgctacccctgaattgcgctcaatgctggcgcgggttgataaatcattaacagaaaacttcattcaatctgaaattccggctgagttccgggcagcttatgaacgacgatttgcggaagggaaagatgatactttagaaggtaaaatcctcgcggttgctgataagattgatcttatgtatgaatcatttggtgagatccaaaaaggtaatcctgaaccagtttatatggatatttataagtcgagcttgacggcaattatggattttcgtgatatggctagtgtccagtatttccttaagaagattttaccagaattattaaaagataatgcagatggtaatgctaaaaaccaattagcaattattactacgcaaattattcaacaataatttatgcttttaggcttccttttatcaaatagttgatttttgaaaacgctttcttataatagaagtagaaggtaaaaattaacaaagtaaagggaggcggcaaggatgacaccaagtttatttgcaggaacatttgcaattttagtattgtggctaatcgttgatattatctgggaattgagtcgaccaagagacattgtaatgcggcgcctctgtgcttggcttaatcttattgcgattattggtggtttttctgtattttatggagtaacccattttgataatgctaatcttgttccgtggtttatttgtttgaattggattaatgttgttgccgcgggcttacaattttactttggttactttcggcataattaaatgataaataaaatattttaagaagtgagtgaaaatgggcttgtttggagagattgttttctactcacttttttactgtaaatttatagacgaatacatgtttgggtgataaactaataacagtaaataataaatagttagtgataagtgggatgcggtaatttatgaagttgcgattccactttattttatttaactgcgacgtaagggaggaatttcttttgatttaccggcaaccagataaaaaatttgaactagtgtcagagtacaaaccaaccggcgatcagccccaagcaattaatcaattgacaaaggggattgaagatggtgaaaaagctcaaatcttattaggagcaacaggaacaggaaaaacatttacaatctcaaatgtgattgccaatgttaataagccaactttgattctttcccataataaaactttagctggacagctctatggtgaaatgaaaaaattcttccctcacaatgcggttgaatattttgtttcctactatgactactatcaaccggaagcatatgttccatctagtgatacttatattgaaaaagatgcgtcaattaatgatgagattgataagctgcggcactctgccaccacttccttactggaacgaaatgatgtaattgtcgttgcctctgtttctagtatttttggattaggggatcctcgagaataccaaaatagtgttctttctttgcgcgttggtcaagagattgaacgtgatcgattgttgaccgaactggttaatattcaattcgatcgcaatgatattgattttcaacgggggcgtttccgcgttcgtggcgatgtagttgaaatctttccggcgtcgcgtgatgaacgagcattgcgaattgaattctttggggatgagattgatcggattcgtgaagttgatgcgctgacaggcgaagtgattggtgaccgggaccatgtttctatcttcccggctactcactttatgactaatgaagaagtcatggatcgggcattgccacaaattgaagctgatatgaagaaacaagtaaagaagtttactgatgagggaaagcttcttgaagcagagcgaattcaacaacggacaacttatgatattgaaatgatgcgtgagatgggctatacaaatggaattgagaattattcgcgttacatggatggtcgaaagcctggcgaacctccctataccttattagatttcttccctaaagatttcttattagttgttgatgaatcccaccaaaccatgccgcaagtacggggaatgtataacggggaccgagcgcggaaacaaatgttaattgattatgggttccgcttaccaagtgctcttgacaatcgaccattaaaactaccagaatttgaacaacatgttaatcaagttgtatatatgtctgcaaccccaggcccatatgaaatggaacagacagaccacgttgctcagcaaattattcgaccgactgggttacttgacccaacagttgaggttcgcccggtaatgggacagattgacgacctagttggtgaaattaacaaacgtattgagaaaaatgaacgtgtttttgttacgaccctgacgaaaaagatgtccgaagaccttactgattatctaaaagatatggggttaagggtcaaataccttcatagtgatattaagactcttgaacgaacgcaaatcattcgtgatctccgtcttggtaaatttgatgttcttgttggaattaacctcttgcgggaagggctagacgttccagaagtatccttggtcgccattcttgatgccgataaggaaggctttttacgtaatgaacgttcacttattcagacgattggtcgcgcggcccggaatgagaatggggcagtaattatgtatgctgataccgtgactgactcgatgcaaaaggcaatggatgaaacaaagcggcgacggacgattcagatgaaatacaatgaagaacatcatattacgccgcatacaatcatcaagccaattcaagaagcaattactgttactaagaaagcaacggatgaagctgaagcagataacagtgctgaatttactgacaaagattttgcaaagctagataaagaggcccaagcaaagatgctggatgaattaacagagcaaatgcgctctgctgctaaacgccttgactttgaacaggctgctacgcttcgtgatacgataatggaattaaagacaaaagcaaaaaaatagaggagggattatttcgtggcaaatgataagatcataattcatggggcacgggctcataacctaaaaaatattgatattactattccgaaaaacaagttagtcgttataactggcctatcgggttctggaaagagttctttagcttttgatacattatatgcagaaggacaacgacgctacgtggaaagtttatcggcttatgcgcggcaatttttaggccagatggataagccagatgtagattcgattgacgggttatctccagcaatttcaattgaccaaaaaacaacatcccataatccgcgttcaacggtcggaaccgtgactgaaattaacgattttctccgcttactatgggcacgggttggtacaccaatttgtccgaacgataatattccaattactagtcagtcaccagaacaaatggtggatcgggtactagaattgcctgaacggacacgtctgcaaattctttcgccggttgttcgtgataaaaagggaacacaaaagaaagtctttgaaacaattaagcgtgagggatttgtccgagttcaagtggatggcgaaacttatgaccttgattcagtccctgaattagataaaaataaaaaacatacggttaacgtcgtgattgatcgaatcatcatcaaagagggaattaggtcgcggttatttgactcctttgaatcagcgctccgcttaagcgatggttatgcaattgctgatgtgattggtggagatccaattccattttctgaacaatatgcttgtcctatttgtggctttacagttggtgaattagaaccacggttattctcctttaatgctcctactggtgcttgtccagaatgtgaagggttaggattgaagctcgaagtagatattgatttagtagtccctgaccgaacaaagaccttaaaagaaagggcgattgttccctggaatccaatctcatcgcaatactatccccaaatgttagaacaattctgcaagtcggttggcattgatatggatactcctttcaataagttgcctaaaaagcaacaacaacagattttgtacggtaatggtgaaacgccatttcacttccattatgagaatgactttggtggcattcgggatgtcgatgtgccatttgaaggtgttatcaataatattagccgacgataccgggagactaactcagattttacaagggaacaaatgagaaagtatatgactgagcttccatgtccagtttgtcatggttaccggctaaaccagcgggccttagcagtaaagattgatgggcgaaatatcggtgaagtttccgctttatcaattagtgattcccttgaattctttaagagcatcaaactttctgcacaaaaaaatgaaattgctaagccgattttaaaagaaatcattgatcgattaacctttatgaaaaatgttggtgttgaatatctaactttaagtcgctcagcacgaactctttcagggggagaagctcagcgaattcgattagcaacccaaattggttctaatttatcaggagtaatgtatgtccttgatgagccgtcaattggacttcatcaacgagataatgaccgtttgattgagtcgttaaaggctatgcgtgaccttggtaatacacttgttgttgtagaacatgatgaagatacaatgcgcgcggccgattacattgttgatattggccctggagctggtgaaaatggaggccaagtgatggcagccggaactcctaagcaaattatgcgatcacggaaatccttaactggccaatacttatcagggaaaaaatttattccagtacctcaagagcgtcgaggaggtaacggtaagaaaattactattacaggagcagcagaaaataacttaaaggatattacagttgattttccacttggtgagtttatttgcgtaacgggggtttctggttcagggaagtcaacccttgttaatatgattctcaaaagggtcttggcacaaaaattgaataataattcagcaaaacctggtaagtacaagtcgattagcggggtcgaaaatattgagaaagttatcaatattgatcaatcgccaattggtcgtactccacgaagtaaccctgcaacttatacgggagtctttgatgacatccgtgaattatttgcccaaaccaaccaagctaaaatgcgtggttatactaaggggcgttttagctttaatgttaagggtgggcgctgtgaagcctgccgcggggacggaattattaaaattgaaatgaacttcttgccagatgtttatgtgccatgtgaagtttgtcatggaacacgttataattctgaaacacttgaagttgaatacaagggcaagaatattgctgaggtccttaatatgactgtttcggaagctcttgaattctttagtgcgattccaaaaattaagcgcaaattgcaaactattgaagacgttgggctgggttatgttcaccttggtcaaccagcaactaccctttcaggtggggaagctcaacgaatgaaattagcagctgaacttcaccggcagtctcacggtaagagtttctatattttagatgaaccaactactggattgcacatggatgatatcaagcgcttattagctgtcctgcagcggttagtcgatgcgggaaatactgttttagtgattgaacatgatttagatgttgtgaaatcagcggactggttaattgaccttggccctgaaggaggagctggtggaggtaatgttgtcgctaccggaacaccagagcaagtagcagaagtaaagggaagctacactggtaaatatttaaaagagatgctcgaacgtgatcaaaaatgggcagaagaacgagaagccaagcaaaaaaagtagttgcaatctaattcttctaatggtattctaataaaaattaaagtacacgaaacgagggaaaagaaatgttattttttaataatcagaatcaacaattttcttcctcctcagcctctaacactattaaggctgagtgattttggtgtacccaatcaataggtttatacagactcgggttctctattaatcatttggcgtgaccaaattgcattaatagatgatacccgggtttttattttgcctaatattaagaatggaggaatgatgatgaatcaacaaccaacagatgaactaaaaaggtcgcttggattttggtccgctatttcgattgttgttgggacaattattggatcggggatattctttaaacaaggatctgttcttgatagtgctggtacatctacgcttgcaattgcagcctgggtatttggaggaattattactttaactggtggattaacagtggcggaaattggtgcccaaatgccatatacggggggattatatgtatatatcgaaaacttgtatgggcgccttttaggatttttagctggctggatgcaagtaattgtttatggaccagcaattattgcttcggttgccggattcatgagtattttaatggcaaacttctttggtttaggaacccagtggcgaatacctttagcagtgattacagtgattgccattggcgtaatgaacctttttgaaaataaagttggggcaattttttcgattgttacgactgccggaaaaatgattccaattgcggcaattattatctttggtttgttctgggggcatcaagatgcttttggtcaaacggttaccgaaattcaccaatcaactggtgggtttggggtagcagttttagcaaccttatttggttatgatggttggattttaatcgcaaaccttgggggagaaatgaaaaatccccaaaaattattgccacgagctatcattttagggattactgctgttcttattatttatactttaattactgttgggattcttaagttccttccagttaacactattcatcggctaggtgaaaatgcaactgcatacttagcggtgaaagcttttggcgcaattggaggaaaattgctgtcagccggaattattatttcgatgatggggactttgaacgggaaaatgattactttcccccggattgtatacgcaatggcgcgtcgtcatgatttgccattctcacgctatctcgcatatatcacgccaaagggtaagtcaccagtagtcgcaacgatgtttattatcattcttgcaacggttatgatgttcttctttgaccctgatcacttatcagatttgtgtgtgtttaccgtttattgtttctatcttttagcattctttgggatcttcattttaagatataagaataagggaccgcgcccattcagcacaccgctttaccccttagtgccaattattgcgattgctggtggaatctttgtcctcgtaagtgaagttatgaatgatcctgctggtgtaattctttttattggaatcgtcatcgtaggattaccaatcttatatattgttaaacgaatggatcaacgacggatgcattaatatttaaggctgagtttgacttggccttttttgttgctcaaataagacacacccggcttgatgtgataaaatagttgggtagctgtatgcgaaaagaggaactagtgatggtagataaaaaattaaaagtagtaattattacagggatgagtggtgcggggaaaaccgttgccgttcatagcttagaagatttaggatatttcgtaattgataacatgcttcctggattggcagaacgttttgttgatgtgatagaagattcgagagagtttgataaaatcgccatggtaatggatatgcgttcacgcggattttacgatgaggttttaccaaactttgaaaaactgaaaaaacgggctgatttagatgtgaaactactcttcttagatgctaatgatgtcacgttaatttcacgttataaggaaacaagacgttctcatcctttatctccgcaaggtcgaattcttgatggggtagaattagaacggaagctttcaactgatcttaaaagtcaagcagatatagtaattgataccactaatgtgacaccacgaaatctaaagttaaggcttaataaattattcggacaaggtgaaggcaatgacttttatgttgaagtaatgtcatttgggtttaaatatgggttgccacttgatgcagatatcgtaatggatgttcgtttcctccctaatccattctatattccagaattaaagcacttaacggggaatgatccagctgttcaaaattatgttgtgcagagtccactggctaaagaattttaccagcatttacggtcgctcttagagattgctcttccgggttacattaaggagggaaagagcagcctgaccattgcaattgggtgtacgggcggtcaacaccggtccgtaactattgctaacaaattatctgctgatttaaaagaaaagggatataaagtaaatacttaccatcgcgatattgagaaggcaaagtaaagaggagttttaattatgttgcataaaccaaagattgtagtgattggcggaggaactggtctaccggttgtccttcgtggattgcgcgatcaaaatgttgatgttacggcagtcgtaacagtagctgatgatggtggttcttcaggaattttacgaaactatattaacgtggttccacctggtgatattagaaacggtttagttgcgttatcagaattacctgatctcgaacttgatatttttcaatatcgttttaagagtagtgaccagttctttgccgggcatgcgattggtaatttaattatttctgctttgtctgaaatgaagggtggtatttttaccgctgttcaagagttatcagaaatgatgaagattaatggacatatttatcctgttgctaatgagccgttgactttaaatgctgaatttacagacggtacaaagttaagtggtgaatcggaaataacggctgcccataagcaaattaaacgggtctgggtaacaccttctaaagataatgatgggcatcctgctcgtcctgtgtcagaggttataacagcaataaagaacgcagatcaaattgtccttggccctggaagcttatttactagcatcctgccaaacttgatgatttctgaagtagggcaagctgtttacgaaagtaaggctgaagttgtctatatttgcaatattatgacgcaaaaaggtgaaacggataactttacagatgctgatcatgttcgggtattaaaccatcaccttgggaagaattttattaatacggtcttagtcaatattcaacctgttccagaaaattatcttgattttcaggaatggaatgaaatttctcaaccagttaagcatgatttccaagggctacgagcacagcattgtcgtgtaattagttcaaattttctgcggctaaaagacaatggtgccttccatgatcgcgataaagttgtagcagaattaatgaatcgacttcaccaagttcacgagtagttaggagactgatgctagatgtcatatgcaagcgaagtaaagaaagaattaacgggaattactgttcatcgggataatgcaaaggcagaattgatggcccttattcggatgaacgggtcgattggcattgctgaccaccagttagttttgaatgttcagactgaaaacccggcaattgcgcgacgaatctattcacttttaaaacaattttacggggtagaaagtgaaatcgtggttcgtcgtaaaatgaaattaaaaaagaataaccaatatatagttcgcttacgctatcatgcacaacatgtcttagatgatcttggtattttacaaaattatcaaattaaagaacaagtacctgtagaattacttaaggatgaatggatggtccgttcatatctaagaggtgcgtttttagcggggggatcagtgaataatcctgaaacttctcgctaccacttggagatatactccctttatgaagaacataatgagatcattgctcagatgatgaacaagtttggtttgaatgctcaaacaaccgctcgccgtagtggttttatcgtttacttgaaagaagccgaaaaaattgcggattttatgtcattaattggtgcaactaattcaatgcttcaatttgagaatgttcgaattgtacgagatatgcggaattcagttaaccgattagtaaattgtgaaaatgctaacctgaataagattgcaaatgcgtcaacgcgccaaatcgaaaatattgaatttattgattcacgagtaggtcttaacagcttacctgataagttgcgggaaattgcagaaacgcgattagcccatcaagaggttagtctaaaagaattaggggaattggttcctggtggtccaatttccaagtcgggtgttaaccatcgtttacgtaaattgaatgcttatgctgatgagttgcgtgcatcgcaggttaaacaataaaaaacctttgaggggactgtgacataagttaagttactttcataaaaagcaaatacgcagtacaacaatggcctctaatgtccggcaaaaccgaacgttagaggcctattgttgcttgcggggctcgaaaacgaagtcacaagtgacatctgtctcgctcccctcaaaggttttattttatcttctttaagtgaaatttatttcttatttatactttcgctaattagtgctaattcagctgctgcgcattcttgatctaattcgttccagttagcggtaacgttaaaaacgtttaatttatttactgacattataacatcctccttgaccttatacctttattctctttcatctacattttgtatcatactacaattggtctaaaaaattaaacattataatatcggcatttgaagaatacttttttaaataggtatagttatattgctgaaattaataatgtaatagcaaagttaatcgtttgtcaaagttagataaattgttaaattttggaaatggcattcacgggatagttgttttggattaagggagacttgctttttaaaacaatgaccggtataattggaacgttaattaatttacgtttaatattaaaggaggcaaagtaacatgcgtaaagcacacccatacggcgtacaaggccgtcgcccaatcgcttcaaagtacaagcgagcattaaaagaaaagaagatcgaagctattcgtaagtgggctaaggaaaagccagctgaagaaaagtaattcagtctataaaagctatgcaattcagtgcatagcttttattttttaataacgccgtttgtaaaattaagttagaaaaatagaaaagccatttgtggtagacttttgaatacccctaaacaaaagaaaggaaaccacaaatgacttacacccatcttaccacaaacgagctgacaatcatcgcccattctttcgtgcaaaagcttaaagcgtaccgagtggcccaaatgatcaaccgttgttccgaaaccgtttatcgcgtttatcgttacctggaaaccggtgccttaattgctgattatcaagatcactagcaacgttgtggccgaaaacgtactcagttgtcactggctgaactcacttatatcaacgacaaaattgcccaggggtggacgcctgataccattattgggcgcgctgagcgcccaattagttgtaaccagcgaactctttaccggatgtttgaacgtggccagttcggcttcgatgtccgttccttgccgatgcgaggtaagcggcacccgaatggctatgtcgagcgccgcgggaaggttggccaattggggcgaagtattcacgagcgtgccaaggactttccgcactatgccactgaatttgggcaccttgaagctgataccgtccaaggcaaaaagcaccaaggggcggtaatgaccctgaccgaacgctaatcgaaggtcgaaattgtactcaatgtgcacaaaaagacggctgatgcgattaaccaacacttaagtcagcggcttcggaaattctcgtggcacttcttcaaatcgattacctttgacaacggaaaagaattcgccggctggcgcgagattgccaatcaatttgaccttcacacttactttgccgaggttggtgctcccaatcaacgagggctgaacgaaaacaacaacggtcttttacgccgggatggcttaacgaaacagctagatttccgcaaccttcctgatgaattggtaacccaactgatgagtaagcgaaataacctgccccgtaaatcactaggctatcgaactccatatgaagtattcatgtcttacgtcactgatgagcaactattttctttctaacttaaattgacatttcgggatttaatggtggattatagaatgaagttagccacccagttggtggtaaataaaaaacgccattcggcgtgacatcaggtatcatattaagtgaaccaaacctatatgaaaggatgtccgtcaaatgacgcacttaaatgataccatgtctactagtttattgactactcataaaaagaatgctcatcttactaaagaagaacgtgtgatgattgcgactttaaagtcgcaaggactttccaatcgcgcaattggtcgccaattaggagttaatcatcaaacaattaataacgagctcaaccgtggtacggtccgccaacttcgtcgtcaaaaatctaatggtaagatttacgaatattcttactacatctatagttatgaagctggtcaggccacatatcttgaacatcaccgccattctggtcgtcgtcgcttatattattcttcaaagcaatttttacgattagctgatcagctaatgcttggtgagtttgacgaccaccattactccccacaagcggttatttataaggctcgagatttaatgaatgatggcaccctgatcccaaagtcggttgtaactttatatcaatggattaatgagggtgtgcttcgtacgtccaatttagacctctttgaaaagcctaaacgtaagcatcatcgaactcatccgcaagctaaaaggtgcttaggtcctaatattgctcaacgacctcaaactgcggaccaacggtccgaaattggccattgggaactagatacagttcagggacagaaaaacggtaatgacagtgttgtactagtaatgactgatcgcctttcacgagttaatatcacgagtaaaattgctggtaaaactgcgcatgcagtaaatcagttctttataaatttacgccagaaaatgggcacagatgcttactatcgcatctttaagacaataacctctgacaacggttcagaatttagtgagttaacacaagttcacgatcatgttttctatgctgatccgtattccccttgggaacgtggatccaatgagatcaataaccggtttctccgcaaggagattaccaaaggtgaagctataaataactatagtagtgctcagatcatagcgactaatgattggatgaatcactatccacgagctatgtttaatggacattcgtcaatggatatctatcgtaaggccttctaccaagagatatcacagctccatcaaccaataatcaattggtcagtattatttatttgagtccagtggctaacttattcttgaaatttaggttcgggatttaattaaatggtcaagaatattttgcaaaaaaagattaaataatagttaaaacatttgaccttttttgaccaatcgagtatagtattattatccgttagcatataagactaacgagtgctaatttattaaggaggccatattatgaatttagtacctactgtcattgagcaatcatctcgtggtgaacgtgcttatgacatctactcacggcttctgaaggaccgtatcattatgctctctggtccaattgaagacgaaatggcaaattcaattgttgcgcaacttttattccttgatgcgcaagactcaactaaagatatttatttatacattaattcacctggtggagttgttacctcaggaatggcaatttatgacaccatgaactttattaaggctgatgttcaaactattgtaatcggaatggctgcttcgatggccagtgtactagtatcatctggtgctaagggtaagcgttttggattaccacactcacaagttttgattcatcaaccatctggtggagctcaaggtcaacagactgaaatcgaaattgctgctactgaaattttgaagacacggaagatgcttaacggaatccttgctaagaattctggtcaacctatcgagaagattcaggctgatactgaacgtgatcattacttgacagcacaagaagcagtagattacggcttacttgatggtgtaatggaaaataattcaaaattaaagtaaagtgataattaaaaagatctccaattattcgattaatttcgaatgacggagatcttttttattatcaaaacgtgcgtggaaattaacagccttgtggcgactgtaatatcttaaaaatgaaaaaaggctgtcgaaaaaattcaacagccttataaaaatgcgccccccgagagtcgaactcggatctcgagaaccggaatctcacgtgcgatccattacactaagggcgcgtcaacaaatattatactatcttaaataagaatgaattgcaagcattatttgaaaattttaattaaaataacgcttacatcagaaaaatgttgtgattgaatagacaatttttttgaagatggtatcataagtatcgtaggagttgtattattgcttagaccttaccactgcgtcacttacaatggttgagagttgcgatgctgatgtaatgtgataaactaagcaagtacactaattatgttttttcctaaaggaggaatttgcagtatgactgtaaaaattggtattaacggttttggccgtattggtcgcttagcatttcgtcggattcacgaacttaacacaaatgatattgaagttgttgcaatcaacgatttgactactccttctatgttggcttacttacttaagtatgactcaactcatggtaagttcccaggtgaagttacatctactgatactggtattgttgttgatggtaaggaataccctgtatacgctgaacgcgatgctcgtaacattccttgggtaaagaacgatggtgttgactttgttcttgaatgtactggtttctacacttctgctgaaaagtcacaagcacacattgacgctggtgcaaagcgtgtattgatttcagcacctgctggtaacatcccaactgttgttcctggtgttaaccttgatactttgactaaggatgacattatcgtatcagctggttcatgtactactagctgcttggcaccaatggctaaggtcttaaatgacgaatttggtgttaaggttggtactatgactactatccacgcatttacttctactcaagctatccttgatggtcctcgtggtaagaagatgcgtaacaaccgtactgcaagtgtaaacactattcctcactcaagtggtgctgctaaggctattggtttagttattcctgaattaaacggtaagctttcaggtcacgcacaacgtgttggtgttgttgatggttcattaactgaacttgtttcaattttggacaagaaggttactgttgaccaaatcaacgatgctatgaagaaggctactaacccagcattcggttacactgaagatgaaattgtttcaactgatattatcggttcaacatacggttcagtattcgatccttcccaaactgaaattatggaaggtgacgatggttcacaattagttaagactgttgcttggtacgacaacgaatacggtttcactagcaacatgatccggactttacttcactttgctactctttaatttgaagtaaaattaaactaatttgattaaggtgggaggaggactactccgcccgcctttttttatcaagagaagaggagacataatacaatggctaaattaactgttgaagaccttcctttagaaggcaagaaagtattaatgcgtgttgactttaatgttccaattaaagacggcgttgttggtgacgacaatcgaattgttgcagctttaccaacaattaaatatgttattgaccatggtggtcgagcaatcttattctcacaccttggccgaattaaaaaagaagaagataagcctggactttcacttcgtccagttgcagaacgtctttctaacttactaaacaagccagtaacatttgttccagttactgaaggtaagcaattagaagatgctatcgacaacatgaagaatggtgatgttttacttgtccaaaacacccgttacgaagacgttaaggatggcgaatatgtaaagcgtgaatctggtaatgatcctgaattaggtaagtactgggcttctcttggtgatgtatttgtaaatgatgcttttggtacagctcaccgtaagcacgcttctaatgttggtattgctactaacatgccaggcaaagcagcagctggttacttgatggaaaaggaaatcaagttcttaggtgatgcagtagataatcctgaacgtccatttgttgccattcttggtggtgcaaaggtttctgataagattggtgttattgataaccttcttgacaaggcagacaagattattatcggtggtggaatggcttataccttctacgctgctaagggaatcaaggttggtaactcacttgttgaaaaagacaagattgacgttgctaagcaaatcttagacaaagctggcgataagcttgtattgccaattgataatgtagtagctgataagttcaacaatgatgctgatacaaaggttgttgaaggtgatattgacgacggttggatggctcttgatattggtcctaagtctgttgaagagttcaagaacgtattaaaagatgccaagactgttgtttggaatggaccaatgggtgtatttgaaatgccaaactttgctaagggtacgcttgaaattggtaaattccttggtacattaacagatgctacaacaattgttggtggaggagactcaactgctgcagttaaggaattgggtgttgctgataagcttactcacatttcaactggtggtggtgcatcattaacttaccttgaaggtaaagaattgcctggaattgccgcaatttctgacaaataattaatgtttaactactatttataattcttatataagaggctgagaaaacttttgcttttctcagcctcttaccgtatcttggtattaacaataaaatggtagataggagggtcaaataatgagagtaccgattattgctggcaattggaaaatgcataaggatgtacaagaagctgtctcttttatcgaaaaaataaaaaatcagcttccacctgccgaccaacttgaaacagcaattgctgctcctactctttgtttggtaccaatggttaaagcggctaaagaatctccgttaaaaataatggcagaaaactgctattataagaatgaaggagcctatactggtgaaacaagtccatatgctttataccaagcaggaatccatcatgtaattttaggccattctgaacgccgaacttactttaatgaaactgatgaattaattaataaaaaagtgaaagcagcattagtaaacgggttatgtccgattgtttgttgtgatgatactatgcgtcgacgagttgctggaaagaaagttcattgggtggtgagccgaattctcgctgatcttcatggattgaccaatgacgaaatttgtcatgttacggttgcttatgaacctagttgggcgattggaacaggcgagagtgctgatccagaacaagcggcggaaggttgttaccttattcgccagacgattagtgatatgtatggcgatgaagttgcaaataatgttcgaattctctatggaggaagtgtgacaacatctaatatcaatgcactaatggcaaaaaatgatattgatggtgttttagtcggagcggcgagcttaaatccagaaacatttttacaattagttcaccattaggcggttaaatgcttgtttttaattgtgtaaaataatacaatgttaagtggaattgctttccaaataaatgacagaggagagattcatcaaatgtcactcattacagatatttatgcacgtgaagtccttgattcgcgtggtaacccaacagttgaagcagaagtttacacagaagccggtggtgtaggccgcggtatcgttccttcaggtgcttcaactggtgaacacgaagctgttgaattacgtgacggcgacaagaaccgttttggcggtaagggtgttttaaaggctgtttcaaacgtaaacaacattattgctaaggaaatcgtagggatggaagttactgaccaaatcgctatcgataaggcaatgattaagttagacggtactccaaacaagggtaagttaggtgctaacgctattttagctgtttcattagctgctgctcgggctgctgctgacgaattacaagtacctctttacaactaccttggtggtttcaacgctcatgtattgccaacaccaatgatgaacgttattaacggtggtgctcactcagataacaaggttgacttccaagaattcatgattatgccagttggtgcaccaactgtacgtgaagctattcgttggggttcagaaactttccacgctttgaagaaggaattggaagctgctggtaaagtaacctctgttggtgacgaaggtggatttgctcctgactttgctaacaacgaagaaccattcgaatacttaatcaaggctattgaagatgctggttacaagccaggtaaggacattgccattgcctttgacgttgccgcttcagaattatggaacgacgaagacaagaagtacaagcttcgttggtcaactggtgaagaatacaccactgaagaatggattaactacttatccggtattattgaaaagtacccagtagtatctgttgaagacccaattgacgaaaacaactgggatgattgggtaactattactgataagttaggcaagaaggttcaacttgttggtgatgacttctttgtaactaacactgattacttgaagaagggtatccaaatgggtgctgctaactcaatcttaatcaagcttaaccaaattggtactttaactgaaactgttgaagctatcgaaatggctaaggaagctggttacactgccatcgtttcacaccgttctggtgaaactgaagacactactattgctgacttggttgttgctacaaacgccggacaaatcaagactggttctatgagccggactgaccgtcttgctaagtacaaccaattaatgcggattgaagatcaacttggtgatgttgctcaatacaagggtatccactcattctacaacttgagtcaacaagctcgtcaagacatcgaaaatcgttaattttaagcattagttaaaaatcaaaaggactatggagaaaattccatagttctttttagttacaaattatttaattaagattaaaaacgattacatcatttatattaaaaaataatgagaaagaagcgttggaatttagtataaaatataatataatctttaagagttaaatacaatgaaaggataatgatacacatgaaaaaatcggcaccagaacttaatcgttcgatgactgctggtcagatggaaatgatttcccttggtggagcgattggtgttggactgtttatgggatcaacatctacaatcaagtggaccgggccatctgttatcctcgcatatacgtttgtcggcttaattctatatattgttatgagagcgttaggagagatgatttacattaatcctggaacaggttcttttgcggattatgcaactgaatatgttcatccagtagctggataccttgctaaatgggctaacgtatttgagtatattgttgtaggaatgtctgaagtagtagcagcaactgaataccttaaatattggtggccacaccttcatacttgggtagctggaattgttattattattttcttggtcctcgctaatttagcgagtgcaaaagcatatgggtcgcttgaattttggtttgcgatgatcaaagttattactattatctttatgatcttacttggatttatgattatcttctttggctttggtaatggcggtcatccaaccggtttcagcaatctttggtctcatggtggatttttcactggtggctggagtggtttcttcttctcaatgtcaattatcgttggatcttatgaaggaatcgaattgctaggaatttctgccggggaagtagcaaatccgcaaaaagcaattgttaaatctgttaagtctgttttattccggattttaattttctacgttggcgcaatttttgtaattgtaacaatttatccttggaatgaattaagcagtgttggatcaccatttgtatctacttttgctaaggtcggaattacagctgcagcatcaatcattaactttgtggttttaaccgctgcattatcaggtgctaattcgggtatttacagttcaagtcggatgctgtttaagctatctcatgaaggggatgctcctaagatttttggtcgtctttcaaaacggatcgttcccgatgctgctatccttggtatttccggtggtattttgattggctttattattgatatgatttcggcaacttatagccattcaactgctgatatgttcgtggttgtcttcagttcttctgttttacccggaatgattccatggtttgtaattttactggcagaattacgtttccgtcgtaataataaagacttgatggttgatcatccattcaaattaccactatatccattttcaaattattttgcatttctcatgttgattgtgatcgttatctttatgtttattaatcctgacacacggatttcggttattgttggtgctgcagtattgattctagcagtcactgtataccttgttcggcatggttttaaaaacgaaaaagcataagataaataagaagctaggaaaaaatccctggcttctattttatttttaaattaatttcgtctcactaagctcatgtagtacaatggcatgtagacttttaataaattggagaagaacaatggagagtagaaaagaggtatttcatcgctataatcagttcaatcaactaattcgggcgatcattattggaatattgactggtttagtagttagtgtatttagactcataattcaacactttttacaattagtaacagcaagttttgcatattttcattctcatccattatggctaataccatggacaattggatcaattattttagcattattattaggatggttagctcaatcctatcctgatataaaagggtcggggattccacaggttgagggacagttgactaaccaatttgatgaaaaatggtggccagtgttatggcgaaaatttctcggcggagttttcgccattggatctggattatatctcggacgtgaaggaccatcaattcaacttggggcaacaattgggcaaggagtagaggaaaaggccaaagtagggcaccttaatcgccaaatagggatcgcaagtggagcagcagcaggattatctgcagcctttaatgcgccaatcgctgcgactatctttattttggaagaagtgtatcataatttttcaccggtaatttggttggcaacatttgtgagttcgctttgttctaatatggtttcgatgcagttttttggcttacgaccggttttgaatgttccttataatcatatgcttcctaataatctttattggcatttgatcgcgcttggtattttattaggtatcttagggcgtctttaccaaattgttattttgcatttgaatggttggacggcacggattcctaaactatctcctattgcttatccaattattccgtttttgctggttattcctatcgcctggtattttccaatcacgttgggcggggaaatgaattaattattattttacgttccttgccattttctttagcgctttttgtggggctttttgtccttcgctttgtattttcaatgattagttatggttcgcaattaccgggtgggatatttttgccaattttaactcttggcgctattttaggcgcagtctattgtgcgttaatggtccgtttgggattaatgccagttcgatatttacctaattttattatctatggaatggcaggttattttgcatgtattagtaaggcgccatttactgctattttattaattactgaaatggttggctcacttgcgcacttaatgccattagccttggtagcagtagtagcttatcttgttgtggatgcgttacacggtgaaccagtatatacagcaatgtttaacgcctttattggaaataatccgcaaccagcacgccataaagaggatgttacgatgtcgattaccatttatgctggcgcccagttggatggttgtaaaattaaagattttccatggccaactgattgtattgtgatggttgtctatcggggagaagaaaagatcattccgaatggtcaaacaaagctgcaagctggcgatacgttaattttgcgggctaattcagcaactactagacaagtttaccatgagataagtcgggctgcgcattatgcacaaggatagcaatagaataataaatatgatatgataattaagataaaagcgtgaaagtattaggaggaaaaatccttgtataacacattaatgactttattcttaattgattgcgttgtattaattgcttgtgtaatgatgcagccagcaaaaaacgataatgatgcaatgtcagctttgacaggtggtgcgggtgacttattctcacgtcgtaaagcgcggggatttgaagctgttatgcagattgttacaacaatttgtggagcactcttctttattctggcattagcgatgatttacgtttcgtcacattaaatttaaagtgcctcctgaaattattgtgattccagggggcttttttgacgctacggttggagtgcaggggatgatgtagtgataacgtatactggtgagtcttttttctttcccatagtggacggcatggagttattttgcttcatgcatatacaggaaatacgaatgatgttcgaatgctgggacgtcagcttaactggcaaggatatacggttttcgcaccgcttttgcatggtcatggtggtgatccgcaaaaggtgctggaaagcaatggcccagatgattggtgggatgatacccggatggcaatttttcgtttacgagatgccggagttgatcaaattgcaatttttgggttatcgcttggtggtttacttgcaacaagagctcttgagaatgatccgcaattattaggtggtggtgtttttgcatccccaattaccacctggggacaatcgaatgttccggaatacttccctaaaattgcggcaaagtattatcgtcagcaaaaaatcaacccattaattactaaggaaaaggttgctaaattgactgaacgactcccccaacaactagcacaaattcaaacaatggcgcatcaaatttgtgaccaattagatcagattcatcagccattctttattgcacaaggaggcacagatgaaatgattgatccagcgtctggactgcaattaaaaacaaaattacaggagaatggggttgcagttgattaccattactacccaaccgctactcacttattaacagttaataccgctcatcgtcaactatttgccgatgtagaaaaatatttacaaaatttattcgaggtgccttctaatgacaacaaataatttaaaagaaaaaatattaacacatttaacagataatgcaggtgtgagttactcagcagaaaaacttgctcatcaattagggatggatgatgctgagcagtttacaccgatcgttcaatctcttgctcaattggaaagagagaaaaaggttcaagtaactgatcatggtgaattcgaagcagttattaaacagcaaccacttattggaactttccacggaaacgataaggggttcggttttgtagactatgaccctgatcttccagacatgtatattaatcctgatcatactttgcatgcattaaatggggaccagatagaagttaaagtattacgtccagcaaaagcaggtagtgatcagggtccagaaggtcaagtaacccggattgttgaacataaatatgaaaatgtagttggtgaatttaagcaagcgactatcggcgatgattacattggtgaaattttgcttaaagataagaaattatcgcagtatcatttctatgtaacggacaagggattaaaaccacttgacggccaagtagtaacagctactgttgagacttatcctagtgatgaggcaccggaagtaatgacgggtgccgttactgaagtgattggtgataaggatgagccgggtattgatattatgtcagtaatctatgctcacgacgtccctcatgaattccctaaagaagtgatggaacaagctaataagattccgcttcatgttctcccagaagaaaaaaagggtcgggtggatattactgaccaaccgcttgttaccattgatgcaattgaatcaaaagacctggatgatgcggtggtagcttggaagatggataatgggcactaccaccttggggttcatattgcggatgttactcactatgtaaagccaggtacaccgcttgatcaagaagcatttaagcgtggtacatctgtttatctaactgatcgggtagttccaatgcttcctaagcggctttctaatggaatttgctctttaaatcctaatgaagaacgtcttgctatgagttgcgaaatggaaattgatgagcaagggaaaattgttaatcaccgaatcttccaaagtgttatgaaatcacatgcccgaatgacttataaagcagttaataagattctggagtcgcatgatgctaaaacgatgaggcaatatgaagatctcgttccaatgtttgaaacaatgggggagattcacaaattactgcttaagaatcggaaaaaacgtggtgctattgactttgaagctcctgaagcaaagattattgtggatgaaaagggtcacccaactgatattcaactacgagatcggggactttctgaacggatgattgaatcctttatgttagctgctaatgaaacagttgctgaacactactttaaggaacacgttccattcctttaccggatccatgaaacaccagatagtgaacgtattaaatcatttgtggactttttagctgtgtttggaattgaggttcatggtgatattaagaatgttaaaccagggatgcttcaaaaagtattgaaggatgtggctggtactcctgaagagcaaatggttcaagtgatgatgttacgtagtatgcaacaagctaaatactcggatgaagagctaggtcactttggcttaggcgctaaatactacactcactttacttcaccaattcggcgataccctgatgatacggttcaccgtttgattaagtggtacgaagaacatggtaaaaacgaaccagctaaggaccattggcgtgataagcttccagaaattgctgaacatacttcggttaccgaacggcggggaattgataccgaacgtgatgttgatagtatgaagaaagccgaatacatggaagaccatgttggcgaaacctttgatgccgtcgtaagttcagtgatgaagtttggtttgttcgtcgaattgccaaatacagttgaagggttagttcatattagcgtcatgaatgatgattattatgaatattcagaaaaacacatggccttaattggacgaaactctcatcgaattttccaaatgggacaacctattaaggttaagttagttcgggcagataaagatcttcgtgaagttgattttgaaattgttaaccctgaagaagcaccaaagacaaagattcgggtcccacgtaatgatgaatatcggggtcgaggtcgtggccgcaaaggacgtgccaataataattcccgtcatgagaacactagcagtaatcattaccgtaatactcaaggaaaatggcgtcgaactcaccaagaaaatggtcgtcaaaataatcgtcaaataaatcggggacaaactcgtcaccacaataattcacgtgatcatgaaggcgtttgtcgccaccattaagagcggggagggatattatggcaaaaaaatcccatcaagaaaataatgacaatttaattgcacaaaataaaaaggcacgtcatgattattttgtcacggatactgttgaagcaggattagttttaacggggacggagataaaatctgttcgtgctcaccgggtgaatttgaaagatggatttgcccaagttcgtaacggtgaagcttggttaatgaatgtgcatattagtgagtatgataatgggacttacttcaatcaagatccattaagaaatcgcaagttgctattgcacaaaaaggaaatcaataagcttgtaggagctttacaggataagggagttacgcttattcccttgaaaatgtatattaaacacggctatgcaaaagttttattaggactagccaaaggtaaacaccagtacgataaacgtgaagcaattaagcgtcgtgaacaaaaccgtgaaattgaacgagttatgaaacattattaaaacgaaaagcctaggtgaaaatcacaaattttcacctaggcttttcactttaaaatctatttgtttctacgttctttacagtttaagtttaactgattgctaattgaaaatgacatgctggtattaagattaggggaacgcttcattaatcgtgctaataaaggttcttgttcacttcgtcgagcccaatggttaagaatactagcgattagaattgctaaaggttcatcttcttttttatttatctttaattcatgacaatatccgcttgatagtttaacgggttgaattgaaaaaactaagtgactaccggaaaaaacacggtaacggcttgttaatggtgaaccaacaacgatccagttaataccgcgtatataaataacctgttgaacaaatccaagacctttcccaattgttccaacgcgttgtcgattaacatataatgcgaatttgggtaacagtccaagagttaattgctttacttcagctaataaggctccatcaattgcatacaatgatagggcatcgtacctcattccccacttaccgacaagaagatagcacgatttaccattcttatcgcgaatgacggtcgttccatgtaaatcacttgaacgatcgcgaatatataattgtcgcactttgccaccaccattctttgataatctaccttttattttaccagcttcttagcaaatttggtgaagaaacttctaagttaaaaaacgcttccaatttatcccatgatgatgtttaattatgctaaaataataggcgaggtgctaataatcgtgaaacaattaattcataacgactggtgggaagttttaaagccccagtttgaaagtgcatattatgcgcaattgcataatttcctaaaagaagaatatacccatcaaacgatctatccagaaatgcatcatattttcgaagcatttgaatggactccttttagtaaggttaaagttgttatccttggtcaagatccttatcatggaccaaaccaagctcatgggtgtagtttttcagtactgcctggggtgccggtcccgccttcattacagaatatttacaaagaattgcaaagtgatttaggttgtataccggtaaatcacggctatttaaagaagtgggctgatcaaggcgtcctgttattaaattcggttttgacagtgcgagcagggcaagcatattctcaccgtggacatggctgggaacaattaacagatgcagcgattcatgctttatctgaacgtcctaaaccagttgtgttcatcttatggggacgggctgctcgaaataagaaacagttaattaatacgaagacaaatatcgttcttgaatcagctcacccgagtccattatctgctaaccgtggattctttgggtctcgaccattttctaaaacaaacgaagcacttcaggcaatgggagaacagccaattgattggcaactgcctgccaaaccaaattatcgttaaagatgtgattgttagtcacaactttaaaatgtttagtgaccataaggaggtacttgcattatggaattatttgatgagattgctgcaaagattaagggacaaaacaagaccattgtttttcctgaaggtgaagataagcggattttaggagctgctgtccgtttaaagaaagataatttagtagagccaattttacttggtgatgaagaagcgattaaagaagttgcaagtaaaaatggttttgatcttgctggccttcaaattatcgatccagcaacttatccagaagacgataagcaagcaatgtttgactcattaatgaaacggcgtaaaggaaagaatacccctgaagaaattcaaaagatgcttgaagatgtgagctactttggaacaatgcttgtttatatgggaaaggctgatggaatggtttctggtgctgttcattcaactggggcaactgttcggcctgcattacaaatcattaagactaagcctggtgcccatcgaattagtggagctttcctcatgattaaaggcgatcaacgttatatctttgctgattgtgcgattaatattgaattggatgccccaacaatggccgaagtggcaattcaaagtgcggaaacagcacgcttatttgaaattgatcctaaggttgcgcttcttagtttttcaactaagggttctgctaagggtgaaatggttaccaaggttgcggatgctgctaagctagttcatgaattagatcctgatttaccagctgatggtgagttacaatttgatgctgctgttgtcccatcagtaggtgaacttaaagcccctgattcaaaagttgctggtcatgctaatgtctttattttcccaagtctggaagcagggaatattggctacaagattgcacaacgatttggcggttttacagcagttggtcctatccttcaaggacttaacgcaccgattgcagatctttcacggggatgcagtgaggatgatgcttataaggttgcaatgattaccgcagcacaagcattgtaaatattgatgaaaaggaagtgggactaaaaactcgcaagcgagtttagtcccacttcctttgctttttaaacatgagatgggtacaataaggctagtattttaaacttggagagagtactatggagagcttaacgttaacgaatcgtgacgcaacaattgcccttggaaagaaaattggtcagcaattagttgccggggatgtgctagtcttagacggtgatttaggagcaggcaagactacttttaccaagggattggctgcagggttagaaattcctgatatcattaaaagtcctacttttacaattattcatgaataccaagatggccgtctccctttataccatatggatgcatatcgcttagaaaatgggggagcagaagacctcggacttgaagaatactttgatggtgatggagtttcagttgttgaatgggctgaatttgttgaagatgaattgccagctgactttttagctattcacttcaagcgaacaggtgatgataatactcgtattctggaatttgaaccccatggacagcattttgaccaaattgtaaaaagcgtggtgaaacaatggcagacgacatttcgataaagttagcaacgagtgaggatgccggggctgttttacaatttctacgggcaactgcaactgaaagtgacgcggtattagttccgcatttaaatgagattagtgaaaagacagaagcaaaaaatatcgatttaataaatcaatttgatgattgtgttattttacttgcgatgctcggcgaagagattgtggggatggttactgtaatggtattagatcatcaaccgacaaccggtgaattaggagtcgtggtacggaaaaagtattggcgaaacggaatcggtcgcttattagttgatgaagcagagtattggtttaatacttatagtagtttagaaaatttgatcctgacagtttttgaggataatattccggcaattaatctttatcagcaattacactttgttacaatagaaaaaacggttgagcagggtcgtaatgtcctgcaaatgcaatacgataataaaaaagaggaaacaatggaaaagtaagccattatttcccctttcttgtgcgcccggcatgggtattagctaggtggtgaaagtccgctatgggccgtagtagtcggaaccatgagctgaggacaagggtgtccaccgtgaggtggaatttgaaggaagtctaaggcaaagtactgcatcgatgaacaagaagtagctataaggctgaaattaactggataaggctgctagacaagttgaagtccaatactactcgaagttggtctcagtaaagctaacgatgacatggtacgaaagctaatattcttacccggggagatctggcctacacgtttccgacaagaggaataagtttaatttccacagaaacaagcggtgcagtgatgcagtgttgagtaagccagaagtcagccgaggtcatagtagtttgaataatcagatgaaggactgaacgacaataacttgtaacttatatcggagatgtaatcaggtgcgacaatcgcagaaaacagaacaacaagctgaccgcttgtcgaggataggtttggaaaaccgaaagtacacaagggcgcgtagtaccggttatggtgaaggtaaaggtatgagtgtcactatccaagacctggtcttagatcgcaataaccttaatcaggcttatttgcgagttaagagaaataaaggagcagcaggcgttgacgatatgacagtcaatgaccttctgccatatctcagagaaaataagacggaactgatcgctagtttgcgtgagggcaagtataaaccagctccagtcaaacgggtagaaattccgaagcctaatggtggagtaagaagacttggaataccaacggtggtggaccgaatggttcaacaagctgtagcccaaattcttacgcctatctttgagcgtgttttctctgataatagttttggcttccgtccccaccgtggggcccatgacgctattgcaaaagtagtagatctttataatcaaggctatcgaagagttgtcgacttagacctaaaagcctattttgataacgttaatcatgacttgatgattaagtatctccaacaatatattgatgacccatggacactaagattcattcgtaagtttctaactagcggagtcttagaccatgggcttttcgctaagagtgaaaaaggaaccccacaaggagggccattgtcaccactactggcgaacatctacctaaatgagttggacaaagagttgactagacgtggtcaccactttgtgcgctatgcggatgattgtaacatctatgttaaaagtcaacgagccggagaacgagtaatgcgaagcattacccagtttctagaaaagcgcttgaaagttaaagtgaacccagataaaaccaaagtcggtagcccgctacggttgaagtttcttggcttttcgctgggtgtagaccacaatggggcctacgcccgtccagctaaacaatcgcaacaacgagtaaagaaagcactgaagttattaactaaacgtaatcgtggaatatctctgacaagaatgtttgaagaaattcatcgaaaaatgcgtggttggcttcagtactactcaattgggaaactaactaactttattcaacgccttgacaagtggttgagggtccgaataaggcagtatatttggaagcaatggaaaaagtttaaaactaaggtaactaacttacagaagttggggctgtcccagcatgatgcatatgtcttcgctagtacccgcaagggctactggcgaactgcacatagtaagaccttgagctattctctaactaatagaaaactggaacaactcggacttatgaatatgtccaagacgctccagtcaattcaatgtgattaagttgtcgaaccgttgtatacggaaccgtacgtacggtggtgtgagaggtcgataatcgaactaatcaattatctcctactcgattgtacatatgtttattttttatgtaggacttgcataatgtttcgccagaaggatccctttgtttgctgtttactaacgtcttgtgttacctctacacatccgaggtatttattttgatcatcacgtaaggcgtaaaaagcaatatttacaggttgaccatgatgcttgatcataatgctaattgaatcacggtctccggtatgcatatcatgaagtacttgcttaacatggccttgactatgcccgggatgaacctcaagcacatgtttacctaagtctgcatccgttcgcttgaataaacgatgccgattagctgatgaccagcgaatgatatcattttcatcaatgaaatcgaattctacggggatggtttcaaaaatagtattaagttgttcaatacttagttttccacctttaagattaatatctgtcatgattatctcctttagccgattaaattaataaagggctgaatctgttgtggggtaaaatgcttgctttgataaagcagaatgttagcgcaagcctgggcatcatcaagagcattatggtggtgatgaaggtcaatatttaacgcgtcacaaacagtattaagtttataatttgttaatcctggaatcaactggcggcttgaagcaacggtatcgagcgtctggtaggcggggacttcgatattgtaatgttctaacgtattccttaaaacgctattatcaaatcgattattatgggcaataactaatttatcaggagtgtagaattggttgatatgttcccatacttctggaaaatcaggcgcattttggacgtcacgttcatgaataccgtggatctgtgtattacgccaaaagaatttagtatgaggattaattagggtgtaaaattcgtcggcaatttgtccattccgaacgattgtgagtgcgagcgaacatgcactgtaacgcttaccattagcagtttcaaagtccattgctataaaattcatcatacatcctccttgcaaaagtcgataattttattttacaatcaactaatcatttttcaaaacttttacttttgaaaaatgatacaatagctcttgaaagtaaatataaaaaaggaagaaatagagaatggctaatttgatgaacgaatttcctgatattgaaattaaacaagatgaaccattaatgaattacacctatactaaaacaggaggtccagctgactggttggcttttcccgaaacgattgaccaggtaaaaaaattggttgattatgttcgtgagcataaaatgggcttaacggttttaggaaacgccagtaatttgattgttggcgatggcggtatagatgatttaacaattattcttacgcggcttaataaaattgaagttcatgataataaggtaacggcacaggcaggagcatcttatattgcaacaaccgaggcagcccgtgatagtgaacttactggattagaatttgctgctggtattccgggcagtattggtggggctgtcttcatgaatgccggtgcatatggtggtgaaactaaaaatgttgtttctgaggctaccgtaatgcttcccgatggaacgatcaaacactttactaatgaagaattggactttggttatcggcatagcagtattcaagataataatggcgtcgtgttagatgctacgtttgctttggaaccgggtaagtatgatgatatcaaagcaaggatggacgacctaaatgaacggcgagaggctaagcagccattagatctcccatcttgtggaagtgtctttaaacggccagaaggatattatgccggaaagttgattcatgatgctggattgcaaggatatacttcaggtggagcgcaggtttcgactaagcatgccggctttatcgttaatattgaccatggaaccgcagcagactacgtaaatgttatccatcatgtccaaaagacagttaaagaaaaatttggtgttgatcttgaaaccgaagtaaggattatcggccggcaagattaaaaagataaagtgtaagtttattaaaagattattaataagcttgcacttttattattttaaagatagtgaagtgatgaatgaatttaacttaatagttaggtgccgttaaaaagggaaaaaataatttaattgatcttattatttgctaattatgaaaaaatctcacaaattgctcattgaaaaattattattatggatgaaaagcgattccaaaggattttgaagtataccgattcactgactgataaaaataactttgtaatcactttcaaaatatgataggatatttaagtctcatttttgaaaaaattcacaaagtaaggagtatatttatgagcaataatgtagttgttttaggaagtattaacgttgatactacttatcacgttgatcgcttccctcaacctggtgaaaccatttcagcagtaagtaagagttctgctcctggtggtaagggtgccaatcaagcagttgcagcagcccgctctggtgccaagacggcttttattggggcagttggttctgataaagaaggagcttacatgcttgaatcattggctgatgatcatattgatacacgccatatcatgactgataagttacatggcactggtagtgctgcgattactttagatgctaatggtcaaaatgacattatggtatatggcggtgctaatcaagcaatgaccactgatgttcttgcaggtattgatgatgttttagaagatgctgactttttaattagtcaatttgaaacaccacaagaagtggctttagatgcatttaagcaagctaaaaaatacggtgttactactcttttaaatccagcaccagctcatgagattttaccagagttattaaaatatacagatgttattacgcctaatgaaagtgaatgcgccttattaacaggtattgaaattactgatgaagaatcaatgttaaagagtgctgattacttccgtgaacggggagttaagcaccttttgattactttaggctcaaaaggagtattttactctacacctacagctcatggattagttccagcatttaaggttaaggcagttgatactacagcagctggtgatacattccttggtgcattaagttcacaattagaaaaggacttatcaaatgttgacaaggcacttgtctacgcacaacgagcatctagtttgactgtccaacaaatgggagcaatgccttctattccaaaccatgatgcggttataaaagcattagcagaaaattaaggagtactatcatgaagaaaacagggattattaattcagaagtttcagctgtcgtggctaatatgggacatatggattggttatcaattggtgatgccggaatgcccgttccatttggtactaagaagattgatttggctgttgataaggaattgccaagctttatggacgtattgaataatgttcttaaggaaatgaaggttcaaaagatttacttagctgaagaaatcaaggatcaaaatccagaacaacttgaaaatattaagaaggcattaccagatgttgagattgcatttatgcctcatagtgagcttaagaagagtcttgctaagacgcatgcctttattcggacaggggaaatgacgccatactcaaacattatccttgaatcaggcgtaacattttaatattaggggttagttttttatggaaaatgaagtaaaaaaagataagggacaaagttgggttcaactgtcagacggttatttaagtcggacaccaatgttccaatttgttattttatgtttaatcttcccattatggggagcagcggccagtcttaatgatattttgattacacaatttaagacggttttcaccttaaatgatactgcaacggcctttgttcaaagtgccttttacggtggttatttcttaatggcaattccggcttcaattcttattaagaagacatcatataagttagcaattcttattgggctattattttatattattggttgtggaatgtttttcccagcttcacatgttgctacttatagtatgtttttagttgctatttttgctattgctattggtttgagttttcttgaaactagttgtgatacgtatgcaacgatgtttggaccaaaagaaactgctaacaaacggttaaacgttgctaatgttttgattcctcttggtgatatcatgggaatcgttcttggtaagtaccttattttcggtgaaggtggaaacattgccgacaaggttgctaagatgtcaaaatctgaggcagaagcttacaatgaacacttgcttcaattgactttgcagccttataagtacatcttgattgttttaatcatcatctttatcgttttggcagttactaagatgcctcgcgctaaggccttctcaactggttctgaaactaaagaagaccaaccatcacttggcgaaactttcaactacttattccacaataagcggtacatgaaaggggttctctgtcagtttatttatgctggtatgcaaacgactgtatggtcattcactattcggttagcattacgccttgattctcatatttctgatgcagctgcttcaactttcatgatctatagttacatcgcttggttctttggtaagttagttgcaaactggttccttgaccgttactcaattactaaggtattaacttggttctcattacttggaacaatttcattagtaattacctttactgttcctaacatcacagcggtaattgcggcaatcgcaactagtttcttctttggaccagaatggccaacgatctatgctcatacccttgatcaaattcatgaaaagaagtacaccgaaactggtggtgcatttatcgttatgtccttaattggtggggcaattgttccaacaattcaaggacgggtatcagatttaactggttcaatgcagttatcattcattgtcccagcaatttgtttcgcacttatcactatttacttctggactgagcaccgttgggaaaaggctcatccaaatgaagtgcaagaacactaaaatttcccaggaaataaataaaggcccagcggttatttaatcagctgagcctttatttatttccaaaactttaaagtaatttttttctagattaagctaaacacgaaatgaaatgatataatatgaacgtgatttagaggatggtgaatgcgatgcaatttataatttcgcttctaacatggcagaatctgattcacttaattgatatcttagtaatttggtttttaatctacgagttattaatgttgattcgtggtacaagagctgtccaactatttcgtggtattctgatcattattttggttaagattgttagttggtatgttggtttaagtactgtttcgtgggtaatggaccagattatcaactggggtgttattgcaattgtcattatcttccagccagagattcggcgcggactggaacaccttggtcgaggaactttctttactcataatcaaacagcaaatgagaaagaagaagatatgattaagcaattagaccaagcgattcagtacatgtcaaagcgaagaattggtgctttaatgagtattcaaatgaagactggtctagaagagtatattgaaacaggtattccactcgatgctgatatttcaggggcattacttattaatacttttattcctaatacgcccttacatgatggagcagtgattataaaaaataatcggattgcagtagcggctgcttatcttcctttgtctgatagtaaattgattcctaaagaattagggacacgacatcgggctgctgtcggaattagtgaagtgacagatgcattaacaattgttatttcagaagaaaccggcgaagtttcaattacgaaagataatgaattaattcgaaacatgtcgcgagatgaatacctaaagttcttacgtgctcagttgtatacgcatgagcctcaacacgaaaacttggtaacagaactttatgctaagtttcaacgtaaaggaggtggccgtcatgggcaaggacactaaaggcttctttcgccggaaatggtttttgagaattatttcgttaatcctagcactctttctattcatgtatgtaaatgggagcaaaagcggcttccttcgtcaaaatactcggaataataaccagagtagtgctttaatgtcgaataaatccgttacccttcgaatgccccttgatgtaacaattgataataataagtatattgtcagcgggtatcctcaatatgttaaggttaaggtaaccggtccttccgcattggttacaactacctctaatactcaaaattttaaggtgtatgcggatttgtctgacttgactcctggtaaacaccgagtaaagttaaaaacgagtgggttaaattcagaattaacttctaaaattgagccacaatatattaatgttaatattcaaccacgcaagacgattacaatgaaagtaactattcgtttgagtactagagatttggataatggctataagcttggacgtccacatagtgatattcagactgtccaagttactggttcacgagatgaagttaataaagtaaatcgaattgttgcttttgtagcaattccgcacgatgcaaaggatagtattgcacgacaggtaacactacaagcaattgatcggaatggtcaaacacttaatgttgtgatttcaccaactactactaatgtttctattcctatttctgcgggttcacaaagcagcagttcaaatgatagttcatcaagtagtagtggtagtgaagagagtgaagaagcaaagagtaattcaagagcaacatcgcgaaatgactcttcagattcttcatctgaaacatcccaatcttcaagcagcataagtaatgaagattcaagttcaagtagtcgaaatcaataataaagatacacatagaggagaagtgaaatgaagttaaaatattttggaactgatggagttcgtggagttgcaaatcaagatttaagtccagaattggcgttccgtgttggtcgcgcaggtggatatgtccttactcggcactcggaacgaaaacaacctcaagtattagttgctcgtgatacacgaatttcaggtgaaatgctagaaaatgcattgattgctggattattatccgttggtattgaggttttacggctaggggttgtcactactcccggggttgcttaccttgttcgggcacaagaagctgatgctggagttatgattactgctagtcataacccaattaaatataacgggattaaatattttggtggtaatggatttaaattatccgatgaattggaatatgaaattgaacaattactagatgctgaagaagatacgttgccacgaccatctgatgcaggcttaggaacagttgctgattatcatgagggagcattaaagtacacttcattcttggaacaaactgtttcaagtgatcttgaaggattaaaagtggtagttgatgctgctaatggtgcaacaagtggctttatctctaatctttttgctgatatgaatgtggactttattccaattaatgatcaaccagatggcttaaatactaacctaaattgtggatcaactcacccagagagcctccaaaaagcggttgtggaaaataatgctgatcttggagtagcatttgatggtgatggtgaccgttgcattgctgttgataatgagggaaatattgttgacggtgataagattatgtatatctgtggtaagtacatggataagaagggattacttaagaaagatacagtagttacaactgtgatgagtaatctgggaatgtacaaagctttagaagcgcacaacttaaagagtgttaagactaaggttggtgaccggtatgttgttgaggaaatgctgaaaaatggttataaccttggtggtgaacaatcaggacatattattttcttagatcacaatacaactggggatggaatgcttaccgcactgcaactcttgtctgtagttaaagactctgggaagacactcgctgaattggcaaatgatgtaacaacttatccacaagagttattgaatattaaggtagcagataaaactactgcaatggaaaatcaaaaattaaaggaaattattgcgcaagtcgagaaggaaatgaacggggacggacgggttcttgttcgtcctagtggaactgaacctcttttgcgcattatggctgaagcagctacgccagaattagttcatgaatacgttgaacggatcggtgatgttgcccgcgcggaattagaagtagaataacttgagaagtgaaaaagcgaggctggaagaaaatttattcttctagtctcgctttttaatcttttaataaattttaaatcatatagaccaatctaataaaataattgacaagataatctaaaaactgtactatacaatacagttgattagatctagtgataatcactagttatctataccaattttatttaaaggatggaatttaattatgtgtggaattgttggagttacaggaactgacaagagtttgtcaattctaattgatggattaaagcgtcttgaatatcgtggatatgactctgcaggagtttatgttaatgatcaacaaggacatgattaccttgtaaagcggccaggtcggattgctaatctagaagcggctcttggagaagaagtccatggtttagccggtattggccatacccggtgggctactcatggtgaaccaaatgaagccaatgctcaccctcaatactctcaagacgaacggttctacttagttcataacggtgtaattgaaaattatgctgacttaaagaaagaatacttatctgacgttaaatttgttagtcaaactgatacagaagtaattgttcaattagttgataaatttgtagttgaatctggaatgtcaacagaagcagcccttcttaaggttcttcgtttaatcagcccagattcttcatatgcatttgtattgatggataaagaacaaccagatacattatttgttgctaaaaataagagtccattattagttgggattgctgatggttacaacatggttggttctgatgcaatgtcaatgattaaggaaactaatacctttatggaaatcggtgaccacgagttggtaatcgttaagccagatcacgttactgttaaagactttgatggtaatgagattgatcggccaacatttaaggttgatatggatgctaatgccgcagataaaggtgcttacccatactacatgttaaaggaaattgacgagcaaccagctgttatgcggaagttagttcaagaatactttggtgacaatgatgtagcacagattaatgaagagatgttaaaagatatggcagatgctgaccacctttacatcgttggtgccggtacaagttatcatgctggcttagtaggtgcgcgcatttttgaaaaactttgtggaattcctacatctgttcacatttcatcagaatttgcttatgagcaaccactcctttctaagaagccgttctttatcttcttaagtcaaagtggtgaaacagctgatagtcgggaagtactggttaatgttaataagcataactggccaagcttaacaattactaatgttgacaagtcaacgctttctcgtgaagcaacttacactgaattactttacgctggtccagaaattgccgtggcttcaacaaaagcctacactgcccaaattgctgtcgaagctattcttgctcaagcattaggcgtttacatggataagcaagcagctaaagactttgatgttaagcaccaattaggattagttgctaatggtatgcaatcaattactgatagtaagaagaaagtcgaagaaattgcttctcgttacctctctaaatctccaagcgccttctacattggccggggaatggattggtcagtttcacttgaagctgctttgaagttaaaggaaatttcatacgttcaagcggaaggttttgcatctggtgaattgaagcatggaacaattgctttaattgaagatcagactccagtgattggaatcattacccaagatcggactgctggtttaacacggagcaatcttgaagaaacgcaggctcgtggggccaatgcaattacaattgtttcacggcaccttgcaaaagaggacgatacattcgttcttcccgatgtcgatgaagtgttgacaccacttcttagcgtaattccagcacaattgttggcttactacactagtcttggtaagggacttgatgttgataagccacgtaacctcgcaaagtctgttacagttcaataaaaattataaaggaagttagagaagctttagttggtttctcaacttctttttatttttaaagtaatttgatattttctttagatttgtttaataaaagggttgacttacttttatggaaacgctaccatgatagttgcaaggtataaaataattaccttctaatcaattctctttctctcttatgccgatcatcgtcttttagacgatgatttttttatttaaactcgctataatgataagggttgaaaggggaagaacaacgtggaagaacaacacgaaacgttaacattaattgaggaaattacccgtaatgacggctcaaaatattatgaaattggtaatatggttcaaaatggccgtgcagaattagcagctgaacggaattttattaaagaggttcgtattttagaactaaatatccctcattctaaaaatattattaaatatgaacactttataaatactcactataagatgcaaaccgaagcaatggatcattgggaagaatggaaacgtcccccagagattgaagaggttgttcaaacgatcttgaaagaaaatcatattgggtaaaccaggaagctgagttatttggtagtactaaaaatggatataaaaatgtggaggttaggcaatgaagccaaattttaatccatcacaggggatgaagtcgcactatttcgttacagggatagacggcttacgaacattagctgtcttaggagttattatttatcacctattgcccaatgttttaatgggtggttatttaggagtgccgctttttctattagtctctggatattttgtaacctatcaatttagtcggcagcttaaatatggtagtcatattaatttagggcatttttatctaaaaaggtttcggagactatatccgacattaattgcgatgttaattttaacaacagcgtacattacattatttgcacgagagctactccataacattcgggcagtaattgttactaatttaacttggatatataattggtgggaaatcagtcatgggcagtcctactttgatcagtttggtggcgtttcaccttttacccatctttggacattaggggttgaagcgcaattttaccttttgtggcctttgattattacgttattgtttgcggtttttaaaaagctacagaatgtgcggcgggtagttttcatattagctgtattgtcagcaatagaaatggctcttctttacgatccggcaaatatcaaccgggtttattatggaaccgatacacgggccttttcacttttacttggctcatggttagggcttgcgtggccattaaatcgacttcggcctaatttacaggcaaatagtcgccggttacttaatattataggaattattgcaacagttttgaccattgttggttttttctcattgaatggacagtccgcctttacctaccgcgggggaatgtttctctatagttttattggaatgatattaatggctactatcattcacccaggtgcggggatgaacaagtggtttacaaatccggtttttcattgggttggccagcgttcttatgggatttatgtttatcaatatcccgttatggtcttttatgaacgagtaatcaaagtcggcaatcatccacttctcaatgcattagtagaaatcattattattttagtagtaagtgaagtttcttaccggttaattgaacgcccatttgctcagtatcagtggtcaaaattaccggctgatctccagcatgtgttagaaacgcatcactttagttggcaaagcggggctaaaatgatggtaagtgcattagttgttgttattgcatttatcggtttgtgccaaccaaaccgtgcaccaaagaaaacagcggttcaacaacggatagagcaaaaccaccaggctgctgaagaacacaataagaagattacaaagggggataatgttgcggaagctagtggtaatacttctaagcttcagaaacagtatgatttaacccctgcacaaataaaagcagcgcagaagttaaaggtaacggccatcggtgattcggtgatggctgatgccgcagatagtattcagaaattaatgccaaatacttatgttgatgcacaagttgggcgtcaaggttctgccactcctgatgttatcaaacaattaaagacagatgggcatttaaataagattgttgtcttgaatttgggaacgaacggccctatgacacaagatacgttagacgatattttaagtacgattggctctgggcaccagatctattgggtaactgctcatgttccaacaaagccatggcagcaaacggttaataacgaaattaaagatttagcaaagaagcataagaatatccatgtggtcgattggaataaggcaagtcaaggacactctgattggtttgcaagtgacaatgtgcatatgggaccaagtggaaatgatcattttgcacggctaatcgcaaaggagatcttgacaaaaaaataggaggttagtaatgacacacgaagatcaattattagacaaagctatcaatatttacttaacaggattaaagggcatcgaaagctttatttccgaaccagcgagtgaatataatttatcttttgaacaattcttgattttacgaaaaataattaaccatcctaatatcaaactaatggatattgccgagcaacggcaagtaacaaggagtgccgtctctcgccaattaaaagttctttttcaacaaaaatatgttgaacaaaaagctgatccagccgatcgacggcgaatgttcttagttgcaacaaaaaaaggcaaagatgctgaaagtgagatttggcaaaggattaatcaccgctttgccaattgggttcagatttatggtgaagatcgtgctgatcagtttttaacactttttgaagactttaatcaacaaataattcaggggaatatccgaaagaaggaataagaaaatgattaagatggttgcgctagacctagataatacgcttttaaatagtaataaagaaattagtcaacgtaatgaacatgtcctaaagcaattacatcaagagggaattaaggtagtgctttgtactggccgcccaatcaatgcaatttggccatatattgaacagcttggtttaactgattcagatgattacacagttacgtttaatggcggattagttattaataatgaatcacgtgaacatctttttgaattagggatgaaaaagagtgatttactgccactattttcttatgttaaacgaaaaaagattcccctcaatgttttagactttgaacgggtatacgaattaaatgattatccaggatctatttatcggacagtgttaaagaatattgaattccaatctttgccaatgagtgatgtgccggaaaaaacttatagtaaagctgtaatggcaatcacccctgaaaaattgtctactattataggagaacttccagctgatcttaaagcgcagtatcatgcagttcaatctcaaccaatgataatggaatttttacctaaaaaattaaataaggcggttggactgaaggcgctactagatcattttggggatgattttagtaatttgatgacatttggggatgctgataatgatcttgaaatgattgaagcagctgcccaaggaatcgtaatggaaaacgggcttcctaacgttaaagcagtggcaacagtaattacagatacaaacgataatgacggggttgcaaagtattgtgaacgttattttgcaacacttttgtaataaagattgttataaaaagtaaaataaagagtatttttggcgcaaatatgaattttttgctaaaaaaatactcttttttatgtataatttaatgacttttcaataaaagttatggggccctaaaagctaactagcacaaggacttacagattttataatcatattaattgacaacttatattacgaaatattacaaaaagtcaacggggagtagtaaatagaaatggtgctgttacagcttagtaatattaagagtgtaatatataaggtgttgaaacggaaaagataatttgttgaataataaaggatggttgtttaatttatgatttctaagaaaaactttgctaaagtatctgctactcttggtgcagtggccttaggtgttagtgcaacggctactgctgctaacgctgacactatttacaccgtacaaagtggtgacacactttcaggtatttcttacaaattcgcaaaagacaacagtatggttaatgatcttgctaagaagaacaacattcaagatattaacaagatttatgttggccaaaagttaatcatcaagagcgatggtgaaattcaagaatacaacgctcaaaacgcagctaatgcaaacgtcgctaataacaatactcaagctactcaacaacaagctgcacaagctcaaagtcaagctagccaaagctatacttcaaatgcttcaggttcagaagctgctgctaaggcttggattgccgctcgtgaatctggtggtaactacggtgctactaacggtcaatatattggtaagtaccaattatcagcatcataccttaacggtgactactcagcagctaaccaagaacgggttgctgaccaatacgttgcgagtcgttacggttcatggcaaaatgctcaggctcactggcaagctaacggctggtactaaaatttaaactgaattattaggacaaagtaaaacgagactaagaaggtaatcttcatagtctcgcttttttatacaaatgtggtataataggtgtacctcttatggggatgtttatggattcgacaggtataggtcgagtttcaattgcgtttcgaaggttgcgtcttcgtaaaaacgctcagttttaaattataactgcaaacaataattcaaactcttacgcatacgctgcctaacaagtagcgcgcgtagatccattccgggttcgtccatggtgcggcaatgggttttataattagtggactacgcttgttactcccgtttgaagtaataagaagagattaatcaagctagctaaccatagttgccctgatcaacggcgttttggttagtgaaatctaaatagttgagatatgaacgtagagattgaaatggcgatatgcttggacacgggttcgactcccgtcatctccactatagggttgcacccagtttcaaatagcttcaaaatgctgatataataagatttctcaaaatgtaagatttaaacaatttcattaaattgcatttaaatgttgtatgaaatgttgtacagaaattaaatatcatttaagcatgaccaccacagtaatatgtggtggatttttttattttaaaatttattgagttgttgctgcttatcatttttgaaattgattttggtagtgtaaagatattaaattgtaaaggatgatgaatacaatgcttagtgatatagacagttggcgagatcttgtagcagcgcgtgaagatgatgaagcagaggcaaaggcaatcatgcaagatgccaagtttgaagatggttttaatgaattacagaaaatagatgataaaattattaaattgtatcgagaattcaatttaaaattaaagtatttacaagataatccacctgctgatacttccatgttgcaatggaatgaattaaagggactaaagccatttcctgttaacgaatattaaacaattagcttgcactaaatgcaggcttttttatttaccgaacgtaattatctaagttttaacttagataatgaaggtgaggtttagcaactggagctatagcgaaaggcggtagttttgtcttatattacttctgatattagaagtaatctgtttgtttacttgacaggacaagtaaatgattgtctgcttctcttcatcagttgaaagagaagggtctgtttggttcattttcgacaaggaaaaacgaacttgctttatccagatttacaattaaatctggtcaattttgattcttttggtgagtcaaaagaatgttcaattataagtctcaaaacggttagtgtttgaacgaataattgaaccagcgtaggggtgaaggggagctgattaagcgcccctccaagaagtatattagctgtattacagctaatattaactacttgcaaattgatcatcaatgttatattattggtatagaccaataaatggtatagctataacatagatgatcaaaccgacgaattacgtgatttagtcaaccgataattaccaaaaggtataggttgaaaatcacttaaaatttttagaattttactggtaatgaggagggataaaatgtgaatacaaatatcaaacgtaatatgattcaagtacgcttaagtgataccgaaatgaaaaatttcgaagcaataaaatcaacgttaaacgaaaaaactaatgctgcaactttacgtgaactaatccaattagcaccattagttggaaagcaatcgcaagagcaagttaaacatttattgaatacctacgatgacttggaagctaaagttagcgcgttgctgtgggatagttcgaatgttacaaaaaatctaaatgaaattgctcatgctgctaatattgcgaagaataatgatccagcaaatgaagacacttggaattggattattcaacaattaaaggaaattttcttaagtattaaccaattaaatcaaataggtgagcagactaaaaagttcttgaaagaaggactggaaaataatggcaattcttaattcgacagcatgtaaatcttcttatggtcgattaacttacatttttaatcaatctgctcataatacaagtaagacgaatcaccgtgttttagcttgttcaggaactaatattaatatgttgcatactcctaatggccatttatcaacattacagtcgggagcttacttagaaaaacaatttcatcaaagtttaaagcgagcttataatccgaaacgaaagtatcaagctcaaagtattattattagcttctcaagtgaagagtttgatacttccgacctaaaacggcaagctactcaagcaatgcaattggtagaaggatacgtacatcaacattttagtgatgctcaaagcgtttcttgtgttcaatgcgatggtgatggtggaaaacttcatgttcatttattgattaatactgtaaagacaaatggtaaaacagtaccaacaaatcgcttctctgtctatcgaatgcggaggaatttcaatgaatatcttgaacgtaattttcaactagttaccggaagagaatggtctaattcatttaataaagcaagtacacgtaaggatgctaaaacaataattacgcggtcaagttgggaagaacagcttaagcagaccataaatcaggttaaacaggaagtacgtaatgttgttgactttattaatcgtttgtctactaaaggcattcagattaaagaacggggtaaaaagaagcaatggacttacacccagattatcccagataaaaatggtaagccaaagcttcatcgagtgcgtgcttattatcagcgtaaggataaagctgggcatgttttatctacgcgcggcttaggtcaagcttatacgagacaaggcttagacaattattggcgtcaacaactagaaaaagaacaggagattacacctgttaaaagtcattacagaaaggaagtaaaaacaaatgacagaaaagatgttcaaactgaacgagaagaactcattaaaattagaacactcgcccgagatgctcaggcagcagcaaacgaacgacagcgacgaatccagcttaatctccaaaaatcacgttccgccgatgctgaagagcggaaacaaagaactcaacctcaaactggatcagctacttcaagacggcgcgaccaaagccgatctaagtcaattagcaagcagcaacgatatgcagaaactacgcagcgacgtgtcaaaaagcagcaagaacgtgcaaaacgaactaacggaaaagatgtcggaccagacctctaaattgatagaagtcgctaagagtacacgtgatattgcttataacaatgggttgcaagcagatattacgaatactcgtcaattggttgatgcaatgcagaaacgacaagataccgctaatgtacatatgaatgaggtaacaagacaaaatgaagctatgaatgctgatttaaaacaaattggtcctgcaattgcgaaagtagttaaggctcaaaaccataatagtgaaattttaaataaggcgttgataaacggatttcatatccatactaatgaggttacagaatctgttgctaatgagtttaagaaacttactggatttacaatcaatgagtttttgcaaaacgaaattattaagcagattaatgttaatgtttatgaagcgaaaaaagcaaaattatcggtaattcaagcagcccaagtaactgaagaagtattacataaaattgcattattaattcaacgctttataagttttgtaagtgtattagtttttgaattagggctaataattgcatgtgccattatgcttcctggttggtggaaattaataggattaatagtgactactagtgcatctgcaattttaaattattatttgaagaggaggatggatactaatgggctataacctaaatatcgatactgacaatgaaggtgcattacaattagcgatgcagggccaacaaattccttcttgggtatatgaaaactctcagatagcccatgagaataagcgaattcgtttagtagctcttcaactcgaagctgtagaagaagcacaacaaaaacagcgaggacaattacaaaaacaagaaaaagagagtaaaaacaatcagcctaataataaacgtcaacgccatcaggtaaaaaagcaaaaagatgatttgttattcgaataaaaaaaagacctcccgtcataattgggaggtttttatttgttcttaagaagttctaatattattttacttaaatgttctgttttagaataatcgtaattttcaagcttattaattaatttcgttaactgtggtccacgatgagaattgttttccgtagccgcctgattagtcattagagaatccatcgatgtgccgagagcagttgccaatcttaaaagggtagtcgaactaacatcatttgatccaccacgctcaaggcgagaaataaaattaattgatagattgcttaactcagcaagttgttgttgggtcatgtttaattcatggcgacggttagcaatattttttcctaataattgttgcatagttaatctcacttatccttttaatattaggataaaagtaagtatgactatttagaacgttatttataagtgttgatagttgcatatatgcatttataattagttatttatgtgcaatgatattgacttatgtgtggatgaaaaatataataaaaaatgttaattgtaaatagcttcttttactattcaaagtgattagtaataaccatgtatttagggagatgttaaatacatataaatagaaaataaaggtcatatcgatttaggtttaattattagaaatttaatgcgcacataacaaatataattttgggggatattatgaatagaaaaaataccatccttaagtcaactttacttgctacatcagttgtaactattagtgcagttactaatgttacggttcatgctgatgacatggcatcaaaaacgcaaagccaaaatacaccggagaaacaaattgccaaaaagcaagataacaacaaccagcaactatctgctttaaagcaacagcaaagtaactctgaaaatgaagtggctaaacaaaatgctgataagttaactgaattacaagaaaataatgctgaaaaaattaagattttagatcagcaacttcaaaaccaaaaacaagttacccaacagactgctaatgatcaattagcggctaaaactaatacagttcgccaatccgaacagtcacaagccgttgctgaaaataatgcttaccaatctcaagtagatgctcaaactaaggctaacgatcaagccgttgctaaccaacaacaagcaaacgcccaagaattagctaacgccgctaagcacatcgttacccctgaacaaaagcaaagtcaaattgactctgccactaagaacactcaacaagccttaaaccaagctaagtctgatcatgacgctattgttaataagttaaacgatcaattaactaacgacctcaagcaaagcgctcaacaagaacaagcagctaagaacgatcttaagcaacctagccaagcagataagcaaaagcaacttgatgatgcgcaaaacgctgttaacaatgcacaaggtaaagccaatgacgcgcaaaacgccttaactaatgctaagaataccctaagtgctaaccaaagcgctttgacgcaagcacaagatggtcaaaaagaacatgtgactaacgctattaaattaccagctggttacattgatgcttggaaagaatatgttaacactaaagaaaaaaatgactatttagtaacagaaagtacttatccagacgtatttaagaagcttgaaacgctagataaagaagcattaaagaacaacgtatatcacactaattcagcagcagaaaaagtgccagtgaccttaaatgctaatggcactctttcacgagatgacattatcaaagccactcaatttgctgtttcattactaaacccaattcgtgaagcaattggcgttactccatacaagatcaccaacgcatctattgatgtcgctcaagatgttgctaacgaatatcgcaaggataactggaatacttgggaccacgcacacgataacgatgctctagatcgcgttgctaacaaatggaatattgaccttgtcggcgaatcatgggctggagacggatcatttggtcaagtcaaatggactccaaacaatggcgatacaaaattcatccacaactataataacctaacactaaatgatttatacaaaggtgtttatagttcaatcttatccttattgttccacgacgccgatcaaggttacggtcacgccactgacctattaggtgttcgtgccgctaattccgatttaaccgttgctggtgacaaccttggtgtaagctttgaatacggcaaggggatgaaggcttggggccaaaccaacgttggtggtttccacttcaactctatttctgacgcttcttccaagaacattcaacgtttagttaaggaaggctacgttgttgacgccgctgatccaaatgccaaagttaaccaaccaggctatcgtgatgaaatcgccattcctggtaacacatctcaaaagcaaatcgctgatttacaagctaagatcaaccaagcacaaaaccaaattgatcaattaaccaagactgctaacgcagctaaccaaacattaactgcggctaaagctaagttagctgatctgcaaaagagcaccactgatgctaaaaacagttatcaacaacaattagcagccattaacactaagtacagcgatcaaacaactaagcttaaggctgaccatgacgctaagatcaaggccgaaaatgacgcttaccaagctaaagttagtcaattaaacaatgaccttcaaactaagatcaacgctattaaggctcaacctgaaaacactgatcaattaaagacccaacttgaccaaaagctggcccaagttaagcaagatggtcaacacaagcttgatcaattaaagcaagctcacgaagctcgtttacaaaagattcaacaagacgctgaagatactttagcggcatacaaggctaacttagacaagaatgctcaaattaagattgctaaggctcaagctgatcacgatgcatcagttaaggctcttaacgataattatactcaacttaagaaccaattagatgctcagcaagctaagctcgttagtgatgaccaagctcaatacaatgctcttgctactaaacttgacggcgaattagctgccttaaagaaccaagtattgccaaagactagcgatcaccaaactgctcaaaacaagcaagttgttgctggtaacaccgataccgttgctttagatactactggtaagactactgttgtgttgcctagagtgactagtgatatcaatggagaaaaaccagagtcagttaaattcttaccgcaaactggtaacgaagagaactcgtttgcaattatcgcactaggtgctttcactgctatgtttggtatgaatttagcttcacggaagcgaaagttttagtttgaaatatagagggaattgatagcattgacagtagaagttgataatgattcatatttttatagcctattaaaagcacatgcagcagaggtagcgaaagagccaggaaagtcgccaagtcactacgcagcatacggtatgccaatcgatgtattacgacaaaatataacagaatatatgtattatggaaattctgaaaaaattgaaaaaaagatacaaacaaccatctcaaacatagcgtatactattcaacttttggaattttatattaatgctaagaatgaattatatttatcctatccaatggagagaatgttgaataaggaaattttaatcacttcctttgaaatccaagaagctctaatcagtataatgtttgacggatactataaggctaaaacggcgcaagaaagaattttaaagcttaaaaataagaaaaaattaagtgaagattttattaatgctttagacgatgaaagaaggtatcgtaataaagttcatttaactggaaaagaagataattctattcctgactataaaatttttgatgatactgaaatggttaataagtcaattaatttgttaaatgagctttttgaactaaaaatacatgatgatcaaaagatagtattaccaaatgttaaataataaatcagatatcaatccagataatggacagcccaatgtagactttaagtaataccataagcaagttcagctcaaaatagagaataatatgtgtttactaaagtagttgcgaaatataagactgaacatcattagaaaaaaagccctagttaacgggctttttaattttttaaaacccgaaatgtcaatttaagttagaaagaaagtagttgctcatcagtgacgtaggacatgaatacctcatatggagttcgatagcctagtgatttgcggggcaggttatttcgcttactcatcagttgggtcaccaattcatcaggaagattgcggaaatctagctgttttgttaagccgtcccggcgtaaaagaccgttgttgttttcgttcagccctcgttgattgggagcaccaacctcggcaaagtaagtgtgaaggtcaaattgattggcaatctcgcgccagccggcgaattcttttccgttgtcaaaggtaatcgatttgaagaagtgctgcgggaatttccgaagccactgacctaagtgttggttaatcgcatcagccgtcttttcgtgcacattgagtacaatttcgaccttcgattggcgttcggtcagggtcattaccgccccttggtgctttttgccttggacggtatcagcttcaaggtgtccaaattcagtggcatagtgcggaaagtccttggcacgctcgtgaatacttcgccccaattggccagccttcccgcggcgctcaatatagccattcgggtgccgcttacctcgcatgggcaaagcacggacatccaaaccgaactgcccccgttcaaacatccggtaaagagttcgccggttacaactaattgggcgctcagcgcgcccaataatggtgtcaggcgtccacccctgggcaattttgtcgttgatataagtaagttcagccagtgacaactgagtacgttttcggccacaacgttgcttattgcgcatatagtgatcttgataatcagcaattgaggcaccggtttccaggtaacgataaacgcgataaacggtttcggcgctacggttgatcatttgggccactcggtacgctttaagcttttgcacgaaagaatgggcgatgattgtcagctcgtttgtggtaagatgggtgtaagtcatttgtggtttcctttcttttgtttaggggtattcaaaagtctaccacaaatggcttttctatttttctaacttaattttacaaacggcgaaataataaatgacaacctttaagctcaatttcaaagtcgctactaatggtattaagactaagtatccagttaatatgatgtgattttataaatttattcaaagagtcgaaatatggtgctaattcagttagacttatttcgactcttcctgtaagacgtaattcatctatttgtgcatcgttaagttgataaccgcaagcaccttttatttcactaacaacagtattaacatgtttttctattacttgatttaattcgctcattacttatccctccgttaaatgtaagatattgagattaattacagtttgaatcgtcatttaagattaatgtgtaaaaacctaaaaggttattactaatatctgtagctttatacattgtccacacacgatcttcttgagaagtttctcgtaaataatttctaattttagcaatgtatggtttaatccgttcagcagtaaagaatagtaagccactatttaatagtgcttgttgctcactatctgttaatagaagacttgcttgcagttgcaagtcctcattaacctcttcaataatttcattcattgtttgcataataaaaaacctcctaaatttttgaattcataaatttttctgcgctgaaagcgcgaaactttagaagctatgtgtttattgttaaattattgacgtacattattgcgtacgttataattacggtataactataatgtgaaagaaggttaattaaatggataacattattacaccaactaatgcgcgaaaaaatttatataatctgattaagaaggtcaatttagatcataccccagtaacaatctcttcaagtaaaaaagaagaagatgctgttttaattagtaaaagcgattgggacgctattcaagaaacaatgtatttagaaaataatggagttggtgatgtagttcgtcaacgtgagaaagatgatagtggctttaccgatatagatgaaattgattgggataagttgtaatgtataaagttcaaattaagaattctgctaaatcagatctaaggaaaattaagcatagcaatttaaaaggaaattttaatagggtcatccaacagttaaaagaaaatccatatgaacctaatcaaggatttgaaaaattagagccaccaatggcgagaaagtattcacgaagaataaatgtccaacatcgtgtagtatatgtagttaatgataaagaaaaagtcgtttcaatttattcggcatggtctcattatgaataaaaaagagtaatgagcctgtttaactcattactcttagtagtaacattagcaaaaacacattttttaattagtcttgaattcggtaagttcttaaagtatcaataatgttttccctcaaaacgcatagtgggttaataaattgatctttgtttcgctttaatgcacgattgaatgatttgaattctttataacggtcttgaaataaatcattataaattagctttaagtcatattcatctgaatgctgtgctaaatagcgtaacatcactttttgaacatattcttttttataattttcaaggatttcaggataattcttaccttttaaatacgtatcatctttaacccacgatacatgtttctcaatccgttcaccatgatgataatcgcgtacagtttgatctaatcccataaactgtttagcgtatttttttcgaaagcttgggaagagagaacgataattctttaattcttttcgatacgtcattaactcttcgattgaggagaagggacgtgtcaaataataaccgaaatcactttggggtacaaagccaattggttgataagtgtcgtcgggactcaagttaagccatttagtctgtttccaagttttcatactaacatagcgcttattatcaattgagtgtttcatgtcgtttattgattgcattctaaaatcatcaactttaaatgtcacagtatccttttcgagtagtttaattagtcgatctgttgtccagctgttaggctgtaatccgactagcgctttaatatggttatcttctgtcatattgaaacgagtgcgaatgttgattagagcagcttcggtatatttttgattgtgattatgcgactttagctcaaaaaattgtccaccaaagttatttttgttaactatcacccagcggttatcaaaatagttttcacatttttgacgaataatttcttcattaagtaagttgttagaacagaagataaacccatcagtggtcagtgaaggaacgagactattcgggtatgtttgttcaaccaggtccatcaacgcattgacttgatatcgggcaattgacgtgtattgtgcagctgtaaaagggttagtattacggctgaaaggtacatacattgtgttgccacttaaaaagtctcgtgttccgccagaacctaacccttgggctgatttaccgtagccaccgtttcctaataacttatagaaaagctgaagggcgtcatattttcgatattcatcagatttagagtcaaatttatcacgttttgctttagcttcatttcgacaaattagtgaccaatgctgcatttttccgattggcgctagacaggcaacatgtccatccaatattttttgttcaggaataatgattcgatgaactctaacagtacctccgtgttcaacaatgttaataatatcagttacggtcatattaacatgatttgcttgccggacgtaaattggcccttgatcttttattaaaggcttatagccaaccggcacacgttttacattgtccggaaagtgataagaaacattagcaacaccgattgtaaaagctccatttacaaaatattgtgaatgtttacggtaattttttaaaatgttgctatctaagtcatgtacatctaaaattggtttacaatcaagcctaaaatctgggattaagtgaccagcatctacatagcttgatttgagatcaatatcatatttatatttaaacgcactcgtgataattccagggttaaaggctaaattcattccaccaacatacgcttctcgtgccatagcgaatccatcattatacacggaatcaggtcgaacgctaaattgatcatgactacctttcttatgttttttatcaactgtactagattcaataaaattataacctttccgcatttgatcaaaattcaattgggttgttaaaaaaatttcaggcgaccaagtaattacatctttgttattaaaccaagaaacagtactataaatagaagcgttatttaacttagttaggatattatcaatggttggaggtacattattacgtgtgtaattaaattgatgtgcatgatccgcatattgattacgtaacttagtgctgatcgcaaattttggcttactgactttgaccttctgatttatcaaattgcttacatcaaatttaggattatcttcgtataactttttaaagttaattcgatcggctaatatcgaaggtgatcctttttgatttttagcaggtgctgaaccaattagcttttgatagatatatcctttcttgcttttcttgtaagcaagtgtacctcgagcgagataaggttttagtttttcaataaatagtttttgaaattcaaaattatctgaaccatcaacagcatcgcttaaaactttaacccattctctcgtatctctgggtggttcttgattgtataattttggtcgtaaatatttatcaacatcaataccgcgaaaaatatcttggaaaatatttttaaccgtttttgaatcataaggttcttgagagtaatgagaactaatttcatctgctaaagatgttactgtcgcgggaatatgcacattttcaattaattcttcattatatacatcaattacatttcccataaaaaagtctaagtattttaaagtaacttctgaatcacctagagcatagtttaaataatcatcaggacgtttttctaataaagaacgcatgtgagatttataatagccaccgttataaggatcattgaattcttcaaaagaaattagtttatcctcaagatcccaatctttcgtgttaagtttcttttgatcaacaattgatcccaaggctgctaaacctccttgtggcccaaggggcattgtatcgacaaatttaatagttataggatacttgattcgtcgtgaattaggatttgtaaccatgattgaatatggattactaaagaattcttgcttgtttaaagcaataaaagttggttcattctttgactttccttgaatatctaaatatttttccaatcataataggcggtaatgtcaacacctgcaaagaagcctacatatacaaccggcggaactcgattcgatttattcaacttttctttaattttatcttcttttaaacctaattgtcgcgctagtcgtcgataatctccgtctgtatattcttcacagtaaccaacattattaagataatatcgaacaacgctaataagatcccagaagctgaatgatttgtctccaggttgacgataaattacaatccccatcgcagaatattcagcatattttattacgtattgatgactaataatatcgtcttgattacgatagtcagtatcattactatggctctgcgatgtgtcccattcgctgtcatcagcaataaacactgtgtcaagtccataatctttttttaatttagaaagattttgataatcatcaatcttataatttctaattttaaaagttcgtgttaatgtgttaacaccgctcaaatttatagcctccttatataactaaaggaagcaatactaaaaaccacactatactaaatagtgattagtacacacaatatttatatgttataattttttaaatactgaagtgagtttttaattggtaatgatacttcactttagtgtttttaatattttttgtttggagaattaatcaaatggcggtttggttaattcttttttgttattttgggtgaacacttttgttaatgttgttcacccaataaatgctctgctttcttactgtcacaacgattacggtagggtgtcaagcgggttctttatgggagagtccccagaggtgctaccttttgacactaattcattattaatgataattgctaatccatttaccattccaagctttatttggaaggcgattatgaataccggctaaataaatttgcttggttgtgggtcgcacatgatgcgaacgataatacttaattaacaacccggttagtgatttattagggtcaacttctcgttgaaaaatattacctggcaaattttgaggaaggcgattataaaacggtggacaacagataacatcagcgatctcgaactttatctgataaaacagagcttgaagcaaataattattactgatatttaagctttttgccactaaactaaagtcattttgatcacttcgatctcgcttgtttttgttaaaccaaagcaagaaatctcctggaatgagagatgaagctaaaggatgcaattgactgcgataccaccacgaatcatgcggaacatagtcaatttgtagtttactccgctcaattgttttattagatgaagaaaaagtataattcaaatattgtttatgatgatgctttgagatacctttttctacatctacattaattaatgttaattggctttggggctgcgtgaataaagagttgttcagactaacgctttgtagtaatcgtgtgtaagttgctgctgtaacttgtgacggttgatgtattgctagctcactaatttttaagtttaacgctgtcattaacgaattgagcgattttagtgcttcagttttttgctcttcatgtgatgcgttaatcataagatcacatgtcttaaaattttcactaatttgaagtaatttgcgatgcgaagatgctaatgtgagtttgattccaaaatttgggtaaatcacttgtgcatcaactaaaattaagtctttaatagactctgtaagtttactttccaaaagcactcacttcctttttgaaaatgacttatagtaatcgatataatcatcaatcgcccagctaaccagctgattaatggaccgaggtggtttacaaccaggccaaaattgcatgtcaaacaacattttttgtacaatagcttctttgttctcgtccaaattaataatgtaattaataataaacactcctcgatgttttccttgctattaattaatctttagaagtcataaacttatcaagttcatatcgattgaagcgataagttttgccaaatttggtatatggaatgttagtagtagcaatccattggtcaagcgtattaggagctatatttagatacttagcagcttcagactttgacatataaggtggatattggctagtaagtgctcgtttgcttgcctcttcaattgcttgagtaactgcatatttgattgaattagctaagaaatcaggtaattcaactttgatttttgacatttaatcatctcctctcttctcctctttggttaaaataaagttaactaaagaggagaataatatgcaattctagccaaaattaagtaaactaaattttaaccgaattgcttgacgcaatattacaatattactaaaataaaatcaagtaaaattaaatagatttcttttttattcttagttcgcaatggaggtaaattgcgtattatcaactaaaaatagcgattacgattttttttgaggaatatgaagtgaactttgagatatataataaaatagcaattatatcgaatttagatttataacgtaaaaaggtggtatttatgtataatcgggttgcattaggagctagaattaaagttgttagacaaaaaagaggtgaaactcaaactgagtttggaaaaaaatttttgccacctgttagtaaagttgccgtttcaaaatgggaacgcggaattacaaaaccaactgcacagcgtttgcgtgaaattgcgaaacttggtaatgtgacagttgaatttcttattaatggcgacaatacgactgccgaggaagcgcaaaagttgttaaataaagtcattagccgatcacgatctactaatgaagaagataagaaaagattgaacggtattcaactggaattaagacaaaagcttaaatctcatgacgatgctgaaaaaatagcaggtgttaacaaaaaaactcatttattaaatgatctggaatcagaaattcatgttcttgatgaagatttagattattcaagtttagtaacatttgatcaattttttaagctttttaattttctaagtagtattaaaaatccttcaattttaaaagaatttaatgagattctttggcatattaatcaaattgctgaaggaaacgaaatttacgataaagaaagagatttattaaagatagataatttcttgacaaaattaagtatgtctaattagactgatagatataatgtaattcacttctcgatgtttcccttgctcaatcatgcttaaatgatgtacgcagaaagagagtgaaattacatggaaccttatgggtataatacaaaaaagggtaaacgttatcgggtagcttaccgaactccagataataaacaacataataagggtggttttactactaaacgtgaggcacgagcttggtatcgtcaaaaaatggtcgaaattgagaaccatggctttagtagtaatggaaaggtaacgtttgaagaagttgctaatcggtggcttgataataagaagcagacagtagctggctcaacctataaaaaatatgaaacggaatgtaataaacatttaatacctgctctgggtgataaattacttaaagatatcagtattcctacttgtcaatctttagtttatcaatgggctaaagatttcaaattttataataaaatggtcaatgatgccgcaagtatttttgatctaggtattaaatacaaattgatccatgataatccttttaaattaatagagcatccaaaaaaagataaggatgatgaaagaaaagtaagatcatttaccaaagatgagttcattacttttaaaaaaggattgcatgagcattatgaatcaacaaattataaggcgtttgctttcctttttatcttgtcacatacgggattacgaaaaggtgaacttctagctttaacatggaacgatattgaccttaaaggtggattccttcatataaaaagaggtgttacccgtgatactaaaaataatcttataataggtggaacaaagaatatttattctgtacgtgatgtacctattgggccagaaactattaaagtgttggaaaaatggcgttctgagcaatatcaagaactgaaattttttaatattaatacttttaaaccaaatcaattagtatttacaggcgaaaaaggtggtatattgtcaccgtcgaaacctggaaaatggctaaatgtaattgagaaaaagtataatcttccctcttatgtaacgccgcatggactgaggcatacatacactagtttactaattgaagatggaatgtcggtcaatgatgttgctagtgtgttagggcataaagatgctacaattactataaaagtttataatgatttacatccgattaaagataattcgatcggtaaaattattgagaatctttaaaaactaaaatgttgtagagatgttgtataattaacatctaacaacataaaatagttgatatagcagcctttgggggacacgggttcgactcccgtcatctccactatatgcctataaggactgccattggtttatggcagtcttttttaatactaaatattgggataattagtggggtttcataagaagatattctcatgtaaaaattagtaaataaagttcagataaaatataaaggaatgaattaaatggaaatattaatgattgaggataatcattctgtctgtgaaatgatggcaatgttttttaagaaagaaaaatggcactatgaatttgcttatgatggcgtggaagcagaagaaaagtttaacgctgaccctcataaatgggatattattttgctagaccttaatcttcctaaaaaggatggaatgcaggttgcagctgatgttcgacgggtatcaccaacagttcctttaattatgttaacagctcgtgatactgaaagtgatcaggtattgggattggaaattggtgctgatgattatgtaaccaaaccatttagtacgattactttaattgcgcggatcaaggccctttatcggcgaacacatttaaacaaacttgaggatgttcaagatactgatagtgatgatacattcgatattcaaacaaagaactttaagatgaatactaagacaagagaagtattcttatatggaaaaccggtcggtgacttgacacctaaagaatttgacttattaaagacgcttgcctctaaaccacgtcaagtattcacccgttcacaacttttacaattagtatgggattatgaatattatggtgatgagcgaactgttgatgctcatattaaaaagttacggcaaaagttagaaaatattggacctcaagtaattaagactgtatggggggtcggctataagtttgatgacgagggtaacgactaatgaaattaatgtatcggttgatgctttcattttttgcgattattctgacgctaatggtgattgttagtatttcgtttataaatgtaactaataacactatgtatcataatacgtggcaacaattgaaaagttattctgatagtttaattcaggattctattcgttacaatatggcaacccaaagttttgaagggtttgctacagaatcgttaaatagcaatgccaatcttttaacacggcaaaatgttcactttgcaatttatgatacaactcaccggaaaatttttgccagtaacggctttgctcctagtatgagtaaaaatgattggaaaaagttaagaaagggagaaactgtttgtactaaactaattactcctaaaattaattcacgagtatcaaaaggtgtttctccacgaatgaccgaagtttcacgaccatacttctataaaggaaagatgattgcggtagtttcgattgcaactttcgtctcgacaattgagcaaaatatgcaccaaataaagattaacttaataatggcactactgactgctagtcttgtaacgcttgcagttagttacttcttggcacggtcaattaccaaacgaattgatcgattgcggatggctactcaccaaattgcgcaaggaaattacaatgttgaagtggacgataatgggcgtgatgaagtggcagacctcggtcggagttttaaccaaatgaccgcttcgttacgtgaatcgcaacaagaaattcgccggcaagaggagcgaagacgccaatttatggccaatgcagcccatgaaatgcggacgccattaacaaccattaatggaattcttgaagggttacagtatgatgcgattccagaagaggataaaaagcatagtatccagttaatgcaaaatgatacgcggcgtttaattcgcttggtcaatgataatttggattatgaaaagattcgcactaaccaaattgcgatggaacggaaagtatttgatgcatcggcagtactcgaaaatttacgagagcagttagcgaaaaaggcaaaagagaaaaaggatactctgcacttggatgtagaaaagaatttacgggtatatgcagactatgatcggtttgtacagattatgttcaatatcattcaaaacgcaatccaattcactgataacggaattattgacattcggggaaaacgtgtggaaaagggaagtcaatttgtagttcaagataatggaattgggatgactcctgaacaacttgaaaatatctgggaacgatactataaagctgatcgttcacggatgaatactaagtacggagaatctggcttgggacttgcaattgtgcggcagttagttcttcttcatggcggaaaaattgatgtaaaaagtcagtatggtaaagggacgacatttacaatctttttccctgatcgtgaatacgctcctcataatattcaacctacaaataataaagacaaaaagtaagccaatgatttaagtgaaacgctttaactgtgataataaagtgtttattttttgtagaccaatttttataatccaaagagatttaaagaaagcgcttgtgaaagcgtttaccatatgatacacttatatctcgtaataatattacggattgataggagagaattttttatgaactacttacttgctttaatccctgcgattggttggggaattatgccactgatcactggtaagatcggtggttcaacgattaaccaaatgtttggtattggtgccggtgctacgattgttgggttggttgcatttattatcggtcatccaactgttacaacgactggattctggttctcagtactgtgtggtgctttatggacaattggtcaaattggacaattcgtttcatttaagcggatgggtgtttcaaacacgattcccctatcaacagtacttcaattagttggtaactctttgattggggttattatctttggagaatggcgtggagcacgtacccttactattggttttatcgctttagcaattgttattgttggtgctttgatgacctctgttactgatcagagcagcggaaagaaaattactgttcagaatttcctttttctattaattacttctattggttactgggtttactcagcattccccaagatgccaatgattgctaatgatagttctttaggaatcttccttccagaaatgcttgggattttacttggatctgttatttatgctatttgttcaggtaatattgactcctttaagcaaaagaagcaatatctcaatatctggggtggtatttcttggggaattgctgccttagcttatatctttgctggacgggcattaggaattaatacagcctttgtctttacacaaatgaacgttattattgcaacaattggtggtatcttagttcttcatgaacacaagactcggcgagaaatgtcatttacaattgccggaatcatctttattgttgccggaagtattttaactatttttgcttaaattatattaaaactaaacttaaaaagaccttcatcggattttgatgaaggtcttttaatatcgaaattattatttaataagggaaatttcctaagcgatctttttcagtaatgggacgaattactttgcctgggacaccaaggacaagggagttatcaggaatatctttagtaacgacagtacctgccccgataacgcaaccattgccgattgttacacccggacaaactgttacattgcttgcaagccaacagttatcgccaattgtaactggtttgccatattcaacgtcatcgaacagatcgtcagcttgttgacgaatattacgctgctgatacatgagaggatgtatggctgtaatgatcgagacgtttggaccgcacattacattatttccaatagtaacaggacatgtatctaaaatagtaaagttaaaattagcatagaaattcttacctattttagtaaaccgaccgtaatcgatatgaattggtccttgaagatatattccgtcagcatgctgagaaaataggcgatcaataatcattcctcgttcaacagtatcttcatcagttgttaaattatagtcacgataaagacgatgagcaaggtgagaaaacttattgagttccggtgttccaggacgataaggcttcccagctaacatattttcagtgtttttatccatgaataattattcccttcaatttatgtaagcggatacgctgtgtattcccagtatgcctaattaaccttaaattgtcaattttcattaagaaaaatttgctagttctgattgaaaccgacttcattatccgctatcatttaaatgtctaaaaaataaaaatagaaagaagctattggaatgacacacattaaatttgacagtagcgcattaaagcaatttgttcatgaaaacgaacttggcgaaatgcaagcaatggttaacgccgctaatgatgaattacggaatggaactggtgctggcgccgacttccgtgattggctccatttaccaaccgaatatgacaaagaagaatttgcccgtataaagaaggccgctgacaagattcaacgtgattcagacgtcttagttgttattggaattggtggttcttaccttggggctcaaatggcaatcgacttcttacataataccttctaccaagctcaaaaggcaaaagaccggaaaactccattggtagtctttgctggtaactccttgagttcaacctatgttcacgacttaatccaattaattggtgataaagacttttccatcaatgttgtttcaaagtcaggaacaaccactgaaccatcaattgccttccgaatctttaaggaccttttaattaagaagtatggtgaaaatgaagctaataagcggatttatgctactactgataaggctaagggtgccttaaagactgaagcagatgctcatggctatgaaacctttgttattcctgatggggttggaggacgttactcagttctttctgcggtaggtcttttgccaatcgctgcttctggtgcggacattgataagttgatggaaggggctgcacaagcggaaaaggattatgttgatcctgatctaaccaagaacgaagcctaccaatacgctgcttaccggaacattctttatcgtaagggctatgaaacagaattactcgaaaactacgagcctaacatgcggatgtttgcggaatggtggaaacaattagctggggaatcagaaggaaaagatcaaaagggaatttatccttcttcagctaacttcacaaccgaccttcactcacttggtcaatacatccaagaaggtcgccgtttcttaatggaaaccgttgttaagctcgataagccaaattatgacatggaaattccaacagaaccagataatcttgatggtttaggctacttggaaggtaagacaatggattacgttaacaccaaggcttatgaagcggtggttgctgctcatactgatggtggagtaccagtgatgactgttcatatcccacaagaagacgaatatactttaggttaccttatttacttctttgaggttgcgatgggaatttcaggttacttaaacggtattaatccatttaaccaaccgggtgttgaagcttataagtctaacatgttcggattgcttgggaagccaggatatgaagagatcggcaaagaattacgagctaagatggataaaaacgattaggataaattagatataatttaagaagggaatagctgttacgacatagctattctctccttttatctggagtatttttatgaaaaaagaagaattaattgaacatcgggatcgggtaaaagatcatttagtagtgtggattgttttaacaatttgtctgcaaatattaactgtttttcatatcttagcgttcttaaaatatgtagtatggctttctgctgcctatagtattttactaatcatcttgtggtgttatttagaatttaagctcctacatttaaaataatttaataaaaggagtgggactataaacttgcttcgagtttttagtcccacccctgcaagaatgactacgacgcgaagctagcctattggggtattatggacgctgatttatcaacgttcataatccatccatctactgcgttttggcagtttacactttaaaatagtaaagaggttggattattttcccagcctctcttttctattaaataagttaaataagaccaaaacgatttcttgcagctgtattaatacagtttgctaatttctctttaacctttttatttatatctaaattatcggtatcatttttaagataggcattaattatgattgaagccattacatgtttaggaacagaaaatattttaatatccatgtatttaggggggcgggaatatcttcaaaagtgagaacaatatccttaccattaacactaattgttgttttcccgcccttcacaactgtgtagtcaagttcgttaggggtacaatttttatatgcagtcataatggttatcccttcttattattaatattattgttagtataacataatttaagttataatcgatgattgtaaattgtgaagagaagaatggtaagataattgaaaataaaattggttaagaagggaataaaattataatgaacgaatatgtaattggggttaacctaggcacaagtgcagtcaaggtttcagcgatggaccgtgatggcaagattgttgcgcaacaaagctatggttatgatctccatcagcctcatcctggctacagcgaacaagatccgcgagattggctttatgaaacaacgattgtaattgatcaattaattttaaaagaacttagataatgtaaataacggagaaaacaaccgtcttaaggtcattttctccgctattttattgttaatttatttcttgaatcaatccattaaagaagtgttttagtgacacttgcccaccattagtacgctctcctttgagaaatgaaatttcattgtggacatttttatattcatataagttattcgcatattccaaaataatgtcgttttctggataatccatacacatatgtgcgagattattaagaccagtttttatatcgcgtcgaattcgttggaaaattatctttttgccatgctcatcacattggaaaaattcttcaaagttaacctcatcaaaactaatttcccgttcaatcatcgtattaataagtttgttaattgcaggagcgccatttccagctgtaataccgagaaaacgtaagatggactgagcgttttcttttttcttatttttcccactgatcgtaactgtattattattcgttgcagcaccgcttacaaggtccaaaacttgaaggaggcggttagacatattaatattttgcgctgctagtttaatcactgacttaacttctgcaatgtttagtggtttttcaataaaaaaatcaattccatgttgatatgcacttgttttaacagaaggcagaattgcttgagcagtcataatgaagtgtggataatgatgactgtcctgaattttttgaataagttgaactccatccattgctggcattgcataatcgataaacatgatatcaattcctaggcgcattgcatcgtcataggcctgttgcgggttagaagttgttccgacgacagtattgttgaaatcattttcaataatattggataataaatgaataattttactatcattatctaaaatataaaaattcatgtattttcaccgatttcttgatgttgtttgaagtattttgaaacactatttaattttactctttgtgaagataatagacaatagagttgctgttttacaaatgtgtagctgtttccgcttacatccttgtgaataaagagattgctgcaaaaaaacgctgaatttttctgttatttatggagcctttttgaagtattatgaaactttagcctattatagtacttgtattaaaaccttaggaggaaataaaaatggcttttaatttacgtaatcgtagtttcttaactcttgcagattttaacactcgggaaatggaatacatgcttgatcttgctgaagatttaaagaaggcaaaatatgctggttatgaaggcaagaatcttgaaggtaagaacattgctttaatttttgaaaagagttctactcgtactcgttgttcttttgaagttggtgctaaggatgaaggtgctcatgtaacttaccttggcccatcaggttcgcacatcggtcacaaggaatctgttaaggatactgcacgagttcttggtggaatgtttgatggtatcgaataccgtggattctcacaacgcaatgttgaaattttagctaagtactctggtgtaccagtttggaatggtttaactgacgaagaccacccaacacaagtacttgctgacttcttaaccgctcacgaagtattgaagaagccttacaaggacatcaagtttgcctttgtaggtgacggtcaagacaatgtttcaaatgcattgatgcttggtgccgctgtaatggggatggaataccacgttgttactcctaaggaattggaaccaactaaggaaactctagataaggctaatgaaattgctgccaagactggtgctaagattgttgttactaatgacatcaaagaaggtgtcaaaggtatggacgtaatctatgctgatgtttgggtatcaatgggtgaatctgatgatatgtgggaaaagcggatcaaccttcttaagccttaccaagtaacaatggatgttatgaaggctactgaaaaccctaatgttctctttgaacactgtcttcctgcattccacaacctcgacactgaagttggtaaggaaattgaaaagaagtttggcttaaaggaaatggaagttactgacgaagtattcgaaagtgaacattcagttgtcttccgtgaagccgaaaaccggatgcacactatcaaggctgtaatggttgcaactttgggtgaacaaaactaattaggaggcatttgccatggctaaagtagtcgttgctttagggggaaatgcattaggcaaatcacctgaagaacaattaaagttagtaaagaatactgcttcctcattaattgggctcattgctgcagggaatcaagtagttattagccacggtaatggtccacaagtgggtgccattaatttagggatgaattttgctgctgaacacggtaaaactgctgcttttcctttcccagaatgtggcgcaatgagtcaaggttatattggctaccatttgcaacaaagtttagaaaatgaattacaccgtcgttggatgaataagagtgtggcaacgattgtaacgcaaattgcagttgaccctaatgatcctgcttttgaaaatccatcaaagccggttggcgacttctacactaaaaaacaagctgatgaaattgccaaagaaaagggctacacttttaaagaagatgcgggccgtggataccgtcaagttgttccctctccactaccgatgaagattatggaacttgatagcatcaaaacattgattgacgctgacaagcttgttattgccggtggtggtggtggtgtacctgtaatcatcactgataaaggacttgaaggagttccagcggttattgataaggaccgttcaagtgccttgctagctgacaagatcaatgctgataagttaattattttaactgccgttgatcatgtttatgttaactatggaaagccggatgaaaaagctcttaagacgttaaacgttgcagaagctcagaaatacatgaaggaaggacagtttgctgctggtagtatgctacctaagattgaagcatgtctttcatttgttgaaggtcatccagaacgagaagcattaattacttcattagatggtcttgatgatgctcttaccggtaaagtcgggacagttattcgtgataactaaaaagaagatggttaggaaaataaaatcctggccaccttctttttttagctactctttaattttttctgtggaatgcgaatgttaatcgcaagtactgcaacgataactaaaatcgaaccaagaatatctgctcccgtcatttgtaaatgaaaaatcaggactgaaccaattgttgctgataaaggttcaaatgcatccattaaactaaatgtagttgcatcgatatattttaatgaattattagctagctgaaagggaattaaggtcccaattactagaatgcctaacacatataaccaaactgaaggaacgttaggaatatgtggttgactagggtgaataagtactaaggttaatccggcaaataatagcccccaccccgtaataattaatgagggaactcgacctttgcgaagcatgttttgtggaattaaggtgtttgttgcaacaccaattgcagaaattaatccccatattaaaacactaagcgtcattgctaaatggttaaattggccatgagttgcgataataaaaacacctaaaaaggcgataattgcactaataatttcaattcgtcgcggtggcaggtgtcgaaacacagcttgataagcaatgataaaaaagggcccgataaattgaaggatggttgcgatcgaagcattcccatattggacagccataaaataagcatattgaaccgggactaacccaaaaacaccatatgcaaagataatccatgcagagtgaagatccttaaaaatttgaaagggatgctccccacgaatttggcttaataagactaaaataattccagctgaaaccattcgaacctgcgttaaccacattgatgtaattgaactactaacattaaaaagggccttcgcaaaaagccctgaaataccccaaaaggtacaggcagtaataatcatcgctgtacctaaaacttttttatttgacataaaaatactctttccaattagatttgctattttattttatagatttgctattttattttatagatttgctattttattttaccataccaattctgtgaagagtgagctcgaccttttaattatgactatctgttggaattgttttcagcgatgattggttgtggagttcgtgaatataaagccttcacagcctctatgtctcgtgattgaatgggataatatgatccagctggctgcatcacagaaatcttgttcgtgtgctgtagaccaattgcatgccctaattcatgctcagcagtatttacgattcgttcttgtgagtagccaaaggcaggatttaataggtagtaagaatttagctctactgttgcgtgcagataatatccagttgcggaattcatgcttgtattggtaagccccgctgccccattatttggatcattaacagcggaaacactaatatttgcattcttatcattaacgattttaaatgtgaatgacttcgtgttattccattgggcaattgcggtgtctgttgcattctttaatactggattactgatattaacatagatcgttgcagagttttgttcccagcgtgcatcagcgggtgtatcttgtgccccagtttgttggtcagcattttgtttagttggggttgcaacttctttgccggttattcggtgtagccacgattgagtaagcacctgagcattatgaatgccaatattaaattgttcttgaaaggtagaattattttgataaaaccaaataattccgccaaagagtaataaataaaataaggttaataagaaattggacttcttaatcggtcacacccccctagtatttaaattctaattaaaaaagagtaaaacgtccattatttaatatttttttattgttgacaactgtaaactttgatagtatgctgtacctataatataattacaattgtaaactaaaagaaggtggaaatattgagaattgccgttataattattgccctacttttgattgcatttattgtttggtggttcttcggaaagcatacagagtcggcgggaaaatcaactattgttaatgatgaacaaactgcaacgattgtcgttaatggtggttattctccatcaaccgttaccttgaaaaagggaattccggctcaagttaactttgatatgcatgactcgacggcttgtttatcacatgtagtatttgaacagctaggagttaataaggacttaacaaagcaaaagattacgacgattaatattccaacagataaagcccagacttttaattttgcttgtggaatggatatgtttcatggaaaggttgttgtaaagtaatgaagctcacaaacattcagcgattttggatttcatttgtattatcaattccaatgttaatacaaatgcttgcgatgccttttcactggatgatgcctgcctataattggatagcattaattactactactattattatggcaatttcagcatttccatattggaaaagtgcgatcgctgcatttaagaaacatagtgcaaatatgaataccctagttgccacaggaacagctgtcgcttatttttatagtatttttgcaatgataactgatagggcagtttattttgaaagtgctgcttttgttactgtctttgttttactgggggatgcgatggaagagaaaatgcataacaatgcttccaatgctcttggtaagttgatgggccttcaagcaaaagatgctgaagtcttaaaagatggcaaatttgtcaaagtaccactcgatcaagttcaagttggcgaccttattcgggtcaagccaggtgaaaaagtacccgtagacggaacaattctggaaggggtaacttctctggatgagtcgatggttactggtgaaagtatgccggtaatgaaaaaagttggcgatactgttgttggttcaacaattaataataatgggacgattacttttaaagccacaaaggttggagcggatacaatgcttgcacaaattgttgacctagtaaaaaaagcgcaaaccagtcatgctcctatccagaacttaacagataagatttcaaatgtgtttgtcccagcagtaatgattattgctattttgacatttatgatttggtattcctttgttggcgcaacatttgttcaagcattattatttgctgtttcagtaattgtcattgcctgtccatgcgcattaggtttagcaactccaacagcattaatggttggtactgcaagaagtgctaagatgggtgtccttattaagaatggtgaagttcttcaagaagtaagtaatattgatactgttgtgtttgataaaacagggacaattacggtcggcaaaccagttgtaactgatattgttggcgatgctaaaaaagtattaacaatagctgctagtcttgaggaatcgtctgagcacccgttggcatctgcaattcttcaaaaggcaaaaaataaagagatctcaccagtaaaggtagataaatttgaagcaattgaaggtaaaggtgtgcgtgcagattataatgggcaagtagcatttgttggtagcaatcggcttttggttgatgtaaatatttcccgggaaatggcatcacgtgcagaaaaattacagaacgaagctaaaacagttgtttatgttggtcttgatggggaaataatcggcttagttgccattcaagatgttccgaagtcgagttcaaaagatgcaattgcggagctaaaagcacgtggattaatgactgtgatgttaactggtgataataaacgggtagctcaagcaatagctgatgaagttggtatcgatagggtaattgctgaagtaatgccgaatgacaaagctcaacaaattaaggaacttcaggacaagggtaaaaaagttgcttttgttggtgatggaattaatgatgcccctgctttgtcgacagctgatgttggaattgcaatgggatctggaactgatatcgcaattgactctggtggaatcgttctcgttcaaaacgatttgcgaggagttgtccgggcacttgatacttctaagaagacctttaaccggattaaattaaatctcttctgggcgctcatttacaatgtcattggtattccaatcgctgcagggctatttgcatttgtgggctttacgcttagtccggagcttgccggcctagcaatggcctttagttctgtttctgttgttagttcttctctgctgttaaataaaactaagattgcgggagaccatgttgttcaggcttaaactaagattataaggagttaagaaatataattcttagcttctttttgttatattctgcacaaagtaaaaggattttgcggtaaaatattaataaaaatgatggaggagtatttaaaatggcagctgcatttttagttcatactcgattaagctggggaaaaacgtgcgattatttaattgctaatgatgttgagccggggttaatgcatcgttatgagacacgagaagattggcaaggggttattcttgatgcattgatcaatgttcctttagcgccgtatttgccaagtggtcagcctattccgccaattggaacggcaaaagtaataggggtagaagcagttgatccgtcacaggttaaaaaaaatgtgcaacggacacgaagtcaatttataatggcaaccatttggaaaaagcaatcggccttaaaaaactataatttcttacatcatgattatgacaaatggacgcaaaagcaaatttgggccgatattgattactggtgtaattctaaaaaacatcccattatcgatttaattacaaaatggcgttgcacccgtcaacaccaacgattacgtgctgaagagaaatgataaaaaaagagttgactattaagctacttccatgtatagtatatatcgttgtaagtttaatttattgggcattcgccaaactggtaaggcagtggactctgaatccataatttactggttcgagaccagtatgcccaacttctaacaaaagacctgctagctaatctagcaggtcttttgttgataaggaagttatttgttataattacagtcaagtgaggggacgaatatggctagtaattctgattcaatttattatgttttgacaaaactaaagcatcatccagagttaattaaaagcattagaccacgttatactaatacggttatggttctttttgatgattccttaaagatagcggatgcttcattttattttcccgttgatcgtttcatggtcaatcgtttgtcaaatgattttgtggcaaagaatggtgaccttcttgatagctatttttcgatgaccaatggaacgaagaaaaattaccatgatgtttgggcgaccacctgtcatattccagaagagaaagtatatttattagaattatcatttgaataacgcaatgtaagctgcgacaaaagatgtcacagcttatttgttataaagggagagttttgtagtgcttgtttcaacgattgttttaacggtagcggcagttttaagtagtattatttccagcttttttccgcacttttcaattaattatattagtattttcgtcggcttaattattggcttagttcccttttttaatagtcgtgttgctcctttccacacagaagtattcatgtatatagtagctccattgatttattttaaggggcaatcaacgagaataaatttaattggaaaaaggttgcgacaaatctttgaaacggctgtcctcttagtgattgtaggaacaatatttgcaggttttactgtatcgcttttagaaattccactggcactagcatttctgatgggtgccttaagtactccgaccgatgctactgcaactgaatcagtttcagaaggtttaattgttcctgaaagacaagaaaatcttttaaaaatggagttattatttaatgatgcttctgggattatcttagtaactgcaatggcactgtgggtgaaaaacggtcagttcaactatcaacaaacattttttgactttttgcgttcagctggtggcgggataattattggcattttggcagcccttgtaatgatcagttttcgtcaatttttggggcgaattaaccatgatgcttataatgcgcaaatattattatttgttagtacgccattctttatttactttatagctgaagaattagaagtatctgggattattgccgtagtttgcgctggtttaatgcagaatagcgaaagtgtccgaagtcgttttataacaccccgccaattttataatgggctagtacttttaaaattgattcgggagctcttaaataataccgtcttcgttattttggtagtattggttgtcagaatcattcgtgatgacttaattattgggaatacaaattcacaatggattgtgattggaattttactctatcttactaatctccttgttcgttatttctatggactattatcaaagatgggtaataaaggaagtataatttttgctctgggggagtccatggagcagtaacactagccttagtatatatgattattgacaatgttagctcagcacaatttgacatgattgtgttagcagaaatgcttgttattattttgagtatggtggtgccttcaatcgtatttcgctttattcttgatcatgatatgtcaagtaaggagacgggaaaacagattcagcgtttacggcaagaaatggttaaagaaggcttgagagccgtggaaaagatataccttccagaaaacattcgagaaagtgtcgtttatgattcacgggatcaaaagagtgctaattcattcgcagacttttggcaccaatgggctaaagcaagtcgctatccagagttcaatgagcaggaaaaggaactggaacaacgagcattattatgggcattccgggctgaaagacaatatcttaatatggtatctcaaaaggaaaatcgtcgcgactatctttttgagctttacaatgaaattctattagcagaatcgattttgcttgacactgaaaatgaatattaaattaatttgattttaagttgacgaaaaattgaaattaacgtatacttttatttgtacgttattgcccgctggtcaaattggttaagacgtcgccctctcaaggcggagttacgggttcgatccccgtgcgggtgaatatgattgagtctgttactcatttggtaacagacttttttatttatattacaaatttagtaaaagcgttaagaaaaggtttaattgatgctatgatggatttgtgtaaatagaaaaagaataggatggatttggtgagttaattatgcgagtaatgaatttaatgatagtattagcagttattgcgattattattttagctgctcaatatttttctcagttacggaaaaaccgcaacggtaataatttcgtaagtgggggccgtgtcttttttaactggacgttggtcgctgtcttggtaatttgtgttgggggaatagtttttggtagcattcattcacatcgccaagaagcaaagccagctcaaactgataagacagaaaatgttgaatatgctgcttccgacagtgataatttgggaaaagtctcagttcagtttgatcggaaagttactttaaatgataatggagaagcaaaagttaagtttaaggtttctccacaaactactttgacaatccggggacataagagcaaagagattgttaagacgtttaaagcaagtaagggcgaatcattagttaaccatacttatacatttgacgtagctggcacttatgatattattgcagaacgcggtgatcaaaaggtgaccaagcagctaaaggttaaggacaatgataatgcccaagaaagttcatcaagtagtagttcagtaagttctagctcttcttcagttgcttcctcagcaagtagcacagtttcctcgtcttcaagctcgactgcttccactgcgcaaagtaacagtgaaagttcaagcagcacgacagcagcttcatcgaataacggaggaacttcaagaagctacaatacttctcgtccacgatatagtggcaatggcggtggaaataggacctctggtagcagtaccccgactgctcctgcgcaagaaccaagtactcctgcctatagtcaagaaaacaatggctatgttagcgatggcccacaataataatttttattcgtaatcaaatatctaatgataaaagaataaactgctttcaaaggaacaaaagatgatttttttatatgaaaaattattcttttgttcttttttattatcactaataacgtaaaatcgttgatatatcaagaatgaaaagcaaaaaatactgagaggtatattcctaaacaatttatcagtattgaaataagaatgaagtatattatactcgatattaaataatagttatcgaattataaaagtatttaagggagggagaaaaaagatgcttgatacagatgagatcaaaaaaatgaggtacttggtgttgagcttgccccggttgaaactgttggcggacaagtgaaattaggggagaaatctgcttcaagcgttgcttcactcaatagaacgccattattggaaaaaatgcttaaagcggtgccaaattttgcggctcaacaacaaaaattgaacggccaagaaccggtaataaaaaataatccagcattaggtgaatatcaactaattgatgatttaggtggcttaatgcatgggacttacttacaggcaactaatagtgaaagtcaggataaagatcgttcgcttgttagtcgtaattcaacgagtgaaacggcatcattagttaattatcgcgcagctactgattttagtggatatggtcatttgaaaaataatacagaaactaccaaatcagttgaagttgtctatacgctgcctacatttgaagggaaacaaggaacggtacaaattgtacttgatggggcgcggattaatgaatttgacggtcttgaatataaggatgaaaagggaaatgtaattcctggatttgatattacctatagttgccaaggacacgaaggagagtattcaacgattgatactcttaagcagcgtgatgattttagctgggaaaaggtaacagcggttatggtatttggttccttattgccaaacagttcttaccgtgttgaatttccttttaagattacaaatctagaaaatattaatactcaagagcaatttaatttaaatgaatatgccttttatgatttaacagttaataagcatacaacgtcacaattaaacttccgcttaagtacgcctgttttttgcccatgatgcctattaaaatatctcattcatggcattcagccgaactgaagatggtgatgaggtatttccagaagatgttcaagcaatgatgccaactttgggtgaagtaccatatgcgatcagtaactttaacgatgaaatttcatttgagactgatggagataatgtaatgtggcaaggcggtcaatacttctttaagctggccgctattcaaggtgcgattcaagaaaagggattttcagtcaatgttgataagacagggagaaagttaatggaggcctctgcctttatggttcaacctacttatcttgattttgaaagttttgacttcattccttatgttgtcattcaccaactttttattactaaatcatttacgcttaaggcagaggcaaaagatgattggaattcatttggcgggattgaaaaagtttgtggtctctccgcaactaatgaggaacttccggttagtcctgagcaaacatttattgtggatgattctgaattagtcgatgcaacccctagtgattataatgtcattattggttatttccttaacgggagtgaggacaatgatatgttaatcatttcactggcaaaggtaaggatggttgaaaataaacagacaattaatgtttactatgttgacttggttaatatccctgataaaaccaaagatgatttacaaccaagtggcggaaagattctcgaaaatcaaacccaaacttttaccggccaaggtgatgaagattatcataatgaactctggggtgaagaaaacggctttgagatttatgaatatgaccaaggtgctaaattaaggacctatgtcggtagacaaccagctaaagattattatgtttatcttattcataaaattgaaaaaatcaatgaagatcatcaagtaacacgaacaattacttttaatatgccagatggatccaagcagatcattaagcaaactggaaaaattcagcgttttggaattactgataaaacgactaatgaaaaaacatggagtgattggagtaaagctactctccccgcagttaccgcaccccatgttcctggatatacgggtaaaaacgttgatgctgaaccaatttcattaatgtcaaaagatagcaatattaatgttatctaccatccaaagcaagttagtgtcaagattaaatatgttgatgaagctgggaatgtaattgatgagcaaatagtttctggacttgctgacgacttgatcagtcataagccaacagttgaaactgaccgtcttgctgatgaaggttacgtgattgttaataatgaattgccacaaaatgctcgcttaatagccgaagacagtgatcaagaaaaagaatataaggttattattagtaaacaagatttacagacacaacaaattaccgtcttttatgttgatgtccctgataatcgattaccaattgtcaagccttcttctgggcggattattgataatcggacccaaagattaaatgttacagaaggacaaacatatagtaatgaactatggaattttgaagatgacgggtatgaattgtttaaggctgacaaaggggcattaaaggggaagtactttgctggtagtctggaacaacaatattatgtttacctcactcaccaaactactcccctaaaaaaggaacatcacgtaacgcgaacgattcagattacaatgcctgataaaacacaacaagttgtaactcaggaagcaattgctactcgttttggcgttcatgatgaagtgcttggtagtgacatttggcaagagtggagcaaaggagtgattcctgaatatattccaacaccaatcgcggggtatgatgcatctgctattccagctgaacaggttgatgaaaatgcgagcgatcgaaatgaaaagatcagttacactccacaaccagctaaaattttggttaaatttattgaccaaactggtgcaggattaacatccgaggaacttactggggtaaccggtgaagaatttaactacgatccaactccgcaaattaagtcatttgaagatgagggatatgtgcttgatgaaaatagtttccctgctgatcatcattttacagctggggaacagacctatactattactttaaataaattagtagcagtaacccctcatggtaatagtgaggcagaatcaacaatcgaacaaattaagtcgaacgatgatgataaaactggaaataaaaagggaatctttgctgcatttaaaggctattttaaataaatgaattaataaaggagtacaggaggaataaaccgctaatggtaaattccttctgtactcctttttgagttaaaaatattaattatcataattgccggtgattgggttcatttcatggatttgatttgtagcggggtcatattgatagataccagtaaggtgagctatatttggatcgccgccttggttattgcgaacttcaatttgataattattattttgattattcttagtcatgtaataatgattgccatcttgttgaacaccacttgtcttgacaaaactcgttaggacttgttgatcgttttgtgctgaggaagtggaattggtagttgctgattggctgctagaactactagttatggatgaactaggagcttttaccgtttgattagttgatttttctgaactgttagctacctttgagtttacgcttgttgagcttgtatttgttgaagaagtggactgtacactagtaggtgcagaggtttgctcctttgccttttcgctattagtggaggaggccgcctttttacttgtttgttgacttacttttgtcgcagaagtagatgtctttgttggagctgctgcgctattggtacacccagctagtccaagggctgctaaaattactaatgaacttgttaaaactttatttgtcatcttcatcattttaatgaccccctcaatctctcttatttttataacatcattacacctatattataccgccttttgaaatgattttgtaacatttttgacttatttgtcataattgactgattttgtttaataaatttctggatatttttcctttgtctgatttacgttaaaataaaccttattgaggaagtgaattaaaatgatgaataaatacgatttaacaattactaaattacaccaaatggttaaagagggagttgttccaggagttagctatttgatttttgatcatcaacatacgattaaggaagtaacagggatggcccaaatttatcccgagactgaaatattaaaaccaggcatgctctatgatattgcttcactaacgaaagtgataggaacagttccggttattgcccagcttattcagaaaggaacattgtctttagatgatccggtaaagaagttcttaccagaatttaatgatgaccaaccaactattcgcaatcttcttacccatacttctgggattactggttatattccccatcgtaatgagttgactgcctccaaactaaagaatgcttttttgacgaaaatgtatgtggaggatagcttgaaccgccaaatcaaatatgcggatgtaaactatttgtatttaggatggattattgaacgaatttataatcaaccagttcaaaaggttattacagaacaggtccttaaaccattaaatatgccaactgcgacatttaggcctcaaccagctaactgtgtaccaacagaagtacaagaaaaacggggcttaattagaggagaaactcacgatcctaaagggtatattttgggagaaagttgtggatgtgctggcctctttgcatcgttgaaagatttagaggtctttagtcacgcacttattgaaaataatttaaaaggtcttcttacttctgaaacaactgatcttctttttacagatcaaacacgaattcctggtccacatagtcgctctcttggatggaaactgtttcacgctaaagaccaccaccttttgattagtcacactggatttacgggaacttggatggtattagatcgtcaaactgaccaaggctttattgtattgacaaatcgcgtccatcccagtgctaaaaatcaagaatatttagatgctcgtgaccaactttttgcaatttatttaaaagaaaaagaaaaaactttgtgaaatttatatgcagtcaattgaataaccgctttcacagaatatgcgctttaggggtaagaaatgtataaaaactgtcgataatttatattaataacttctttttatatgattcactaaatattgatttgacggcatttgacaacgtttacataaactaatatgatgtagttgtagtcaagtgatacttcaaaaaggagtgatattgtatgcaaagtccaattcacgttacatcagaaattggaaagcttaagacagttatgttgcatcgaccaggtaaggaaatcgaaaatgtttatcctgaaattcttcaccggatgctcgtagatgacattccatacttaccgatcgctcaagaagaacatgaccttttcgcccaaacgttacgcgataatggcgctgaggtattgtatcttgaagatttattaacagacgcactagcagatgataatatcaaagaagaattccttgaaaagatcattgctgaatccggttatgctgctggagcaatccatgacggcttaaaggaattcttacttagtttcagtactaaggacatggttaacaagattattgctggtgtacgtaaagatgagattaaaactaagtatgcttctcttacagaattagcagaagatagggattacccattctatatggatccaatgccaaatgcatactttactcgtgaccaacaggcatgtatcggggatggaattaccattaatcacatgacctttaaggcacgccaacgtgaatctctctttactgagtacatcattaagcacaataagcgttttgctgacaaaggtgttgaagtatggcgaaaccgttatcctgaaggccggattgaaggtggagatgaattagttctcagcgatcatgtattagcaattggtatttctcaacgaacatctgcaaaggctattacagaattagctgaaagtctcttcgaaaagtctgattatgatacagtaattgctatccatattcctcacaatcacgcaatgatgcaccttgatactgtgtttacaatgattaactatgatcaatttacagttcatccagcaatcttacatgatggcggacatgttgatgcatacattatgcacccaggtaataatggtgaaatttcaattactcatgaaacaaatcttaaagaaattttgaagaaggcacttgataagccggaaattgatttgattcctactggtggcggtgacccaattattgccccacgtgaacagtggaatgacggttctaacacgctagcaattgcccctggtgtagttgtaacttatgatcggaactatgtctcaaacgatttgctgcgtaagcatggtattctcgttcacgaggttcgttcaagcgaattatcacggggtcgtggtggtccacggtgcatgtcatgtccaattgttcgtgaagatctcaagaaataaataagataataaaagcagcaaatttatctgagtaatctagaaagggtataattttactgctttttcttgtatcattttagtgtaattaacatgataagaagggaacacgaatggatcgaaaggcaagaagaaaatatattgaacaagtggttaatgatcgtaaaattgagacacaagaagaattgcttaagctgttaactgaggcgggtttcgaaacaacacaagcaacaatttcaagagatattcatgcgttgaatattgttaaagcaaatgatggcgatggtcatacccattatgttcaacttcatgtgacgcccgaacataattttgagcgcttatatcaagggattcatgataatgtgcggacaattgaaactgttcaatttatgaacgtaatcaaaaccgcactaaattctagctatgcgacgattttggctggaatgtttgatgaacttgatattccggaagttgtgggcacacttgctggaaacgacaccttgattatcatcagtaaagataatgatgatgctaaaatggtctatgacttaatcattcaacatatgcattcataaactgcataggagggatatttatggatgaacaaaagaaaggtattggtagaggcgaattaatcgccttaattgtaagctcatgtatcggtaccggaatatttggtatcactagtgatgtagcggcagcggcagcgccaggacctgcattattggcctggatctttgttggaattggctttttaatgctggttctctcgctaaataatttatccgaaaagcgaccagatcttacttcagggattttctcatacgctggtgccggctttggaccattaggtgaatttatttctggatggtcttactggttatccgcatggctgggaaacattgcttttgccaccatgttgatgagctcgattggaacgttctttccaacatttaaaggtggtcaaaacttaccctcaattattattgccatcatcttctgttggctattgacaatcttagttaacaatggtgttgaaagtgcatcctttgttaacatgattgggacaatctgcaaggtcttaccattggttatctttattataatgatggttgtttgctttaaagccgggatgtttacagcagatttctggggacgggttgctaataatgcttctcgcggtaccacaactggttctgtttgggaacaaatgaaaggtaccctaatgacattaatttgggtatttatcggtgttgaaggtgcctctgttatggcaagtcgtgctaagtcacttacagccgctcgtgaagcttctcttattagttttggccttttagtagttatttatgtattgatttcgattttgccttatggtgcattaactcgggcagaattagctggaatgggtcaaccagctattggtcatgttcttcaagcaactgttggtagttggggctcgattttaatcaatgttggtttaatcatctcaacaattgtttcctggctttcttggacaatgcttccagccgaaacaacgatgttagttgccgatgataaagcaatgccaaagctttggggaaaggttaatgctaaaaaggcaccaactgcttccttgatgattacagcggtattgcaaacaatcttcttgttctcgttgcttttcactgataaagcctatgaattcgcatattccttatgtagtgcagcaattttattctcatacttatttgttggactttaccaaatgaaatacagttctgcacaccaagaatggggacaatttacaattggtttgctctcggctgcatttatgttcgcatgtatgttccttgctggatggcaagaagtattattagtttcaattagttttattcctggattctacatttactacttagcatgtaaagaaaatgatcgtaaagttacaactgctgaaaagtggacaatggcgctgattttaatcctaagtatcattgcaatttggcttgttgctaatggaactattgccattagctaggtaaataatgtataattattccacattttaagaatatttataagtgaggtgattaaggtgaaggaaaagaagttaaatctcttcctcttaatcaccttaattgtaggaacgattattggtggtgggatttttaatagtccaaccgatttgattttgaaagcaaatccaatggctgcgttaattgcatggttaattggtggcttcggaattttgatgttagtattagtcttctacaagctttctgttgtcaaaccggagatgaacggtggaatttatacttatgcaaaggaaggctttggcaactatattggttttaactccttttggggatattggatgggagcagtttttggtaacattgcttttatctcgctcttttttaagaccttaaatagtatgatcgggacgcatcaactttcgccattaatgtgttttatcgggggctcaattattctgtggggatacactgcgattacatggtttggtgtccgcgaggcaagtattctcaatgccattattacgattattaagatcttaccgcttttattagttgttattgttggtgtttttgcatttcagccgcatgtttttaatgttcctgattggacaagcattcttgctgttaatcaaacgcatgtcccatttaaagaccaaattagtggtgcgatgagtactattgtgtggtgttttgttgggattgaagcagctgtttcaatgtcacgtcgggcaaagcagccacgtgatgttggattagcaacgattattagctttgtaattgtattggtcctctatatttcaatctctattattccaatggggattctacctgctaaagaacttagtcagacttcagttccactggcagcagcccttagtcatacagcattaggaatagtgggaagccttattattaaaattggcttactgatttctctattaggagcattattgagttggtttatgattggaccagaaattgcatatgtaaccagttatgatcgggatatgccgcgagcatttaaacttgttaatcgccatggtgttcctgggtttgcattaattgtatatacaattattatgcaagtatgtttactagttttactgcttccacagcttcaaatggcctatacaattgcatatactttagctgcgacgatgaccttagttgcttacctgctctctgcgttatatgggttgaaattagcaattagcgaaaaaatgggccttggctttaagattattgctacgttagcttctctttattccgtctatatgttagttgcttcgggacttgaatatgtatttgcaagtgcgattatttttgcgctaggaataccattatttgccagggctcctaataaaatgagtaagaaagaaaagtggttagcaacaattatcgccttagcagctgtgattgcgctgatgctgattattactggaaagattaatttttaaaaaattaaaagggatgaggttagaaggaatttttactttccttcaatctcatccttttttgtattctaatcttcgctagtcatcttacttttcatgttatccattcgccagacaacataggtttcaatcaatgtgattaggcttacccataaaatcgtgaaatttgatgaagtaagaaatagtaagatgattaggatccaagatatccagttccaacgacgctcaagacgaataacttttgcaaagcgtggtgggattctagttggattttgaatggctagtgcttgtagttgggagaaaagacggacttcacaaaaactttctagcaaaaaaataatggtaaatacaaatgttatggtttggttcactgtttgtcaccttaattaaaatgtaggtttaatttttagggctttttgactgcttaagtcggcatcggggtatttatgctcaagagctgctaaaagaatctttttagcaatctcaccatttcttgtaagaatgggaccgtggaaataagagcaataagtgtttttatagattgctccttcggtatgatcttcaccgttatttccattaccagaaattactttaccaagcggacgctcaccttttcctaagaatgtgcggccgttgtgattttcaaaaccatggtactcttgattgctttcttcgtttttgatggtgatatcaccaatgaaacggtgattatcctggcttaaagtatagtgatcaaggatgccaagccccggaatcttttcgccatcagcaccgatataatagtggccgagaagttgataacctccacaaatagcaagcagcggctttccatcattaataaacttgtcaatgcctgcttttttgtttggaagatctttggagacaacaagttgttcgtaatcttgtccaccgccgaaaagagctaaatcaaaatcttgtggattaaagtcgttgtcgatactaatgactttgacattaatatcggtatccatctgtttagcgtaatattgaagggcgataatattaccgacatcactataagtatttaataaatcgccgtagaggtgggcgaggtgtaagtgatattttgccattagtccattcctcctttaatatagcccttttctgctagttgtttgcgtaattgcagaacggctgtatatgttgccagaatatagacatgttcagttggcatttccttgattttatcaattacctgggtaaggtctggttcatgccacatatcttttacgccggccattgttaatctagtggtaatatctttatagcgttctcctcccgtcatgtattgtgggatttgatgttgggtaagtttttcaaagtcgccgtcccagatccagctagtatcaattccatcagcatagttagcatttagtaagaaggcaaagctaaagggctcgtcatctgtctcaatcatatctaaaacctgattaagaccaactggatttttaactaagatcaaagtaacttgttttccatcgatattaatgacttcttggcggccaaaaactcgttcgtctgattcaaaagcatctttaatttgtgcttggctcactccgagaaaacgaccaagagagtaagcggcaagagcattatagatgttatataaaccaccgattccgatggtgtatttttgcccatcaatttcaaaagttgaatgcgtgggggtaagcttatcaattttggtaacagcatacgttaattctggtcgatggaaaccacaatttggacagaagtagttacctagcccggcataagttcgcatttgatactttagaatgtgttgacatttaggacaaaggagaccatcagtgttagctggggcgttgaaaggctctttttcttcgtggttaaagccataatagatgattgggttaggcaagtctttgctgttaaagagctgttcatccccgttagcgatgatggttgcttttggtgctaatttaaccccctttaagatcttgttataagtggtgtagatttcaccgtaacgatccatttgatcacggaaaatgttggtgaagacaaaggcaattggggtgatgtatttacatactttaactacatttgcttcatcgacttcgaggacggccagcccttttttctttggatagggagccgtaataaaggtagttacgattccttgctccatgttggaaccagtcggattagtaagaacttggtcatacttttcccgtaaaactcgtacgcttaatgcggtggttaatgtttttccatttgtccctgttacaataacaaggtcgtactttttgctaaaggcttggagaatatttggatcaagctttaaggttaattttcctggaagggaacttcctccgttcataaaagtatggaggaaccaatagcttgaccgcccggcaaattcggcaaatgaacttcgaactgtcatgaatatatgtattcctttcgtgtcaattgtaagtgatacaatagtgatgattaaaattaccgtttaattctaaactttacgataacaaaaagaaagttattaaactgaaattattataagattaaagttattcaatgtaaaaaactctttcctaatgtggaagtatttaaatgacacaaatttttggatataatgaagagtactatgcaaacaaaaaggagcaattgtagtggcacaactattctttaaatatggcgcgatgaattctggtaagtcaatcgatattttgaaggttgctcataactatgaagaacaagggaaaccggttgttttaatgacgagtggtgttgacgatcgttctggtcgaggcatcattgctagtcggattggcctagagcgtaaagtaaaaccaattatggatgataccaatatttacgattatgttaataagatggaccgtaagatatattgtgtattgatcgacgaagcacagtttttaaagaaagagcatgtcttacaattaatcaaaattgttgatgagctaaatattccggtaatggcttttggactaaagaatgactttcggaatgaattatttgaaggttcaaaatatttactgatttatgctgacaaaattgaagagatgaaaacaatttgttggttctgccctcataaagctacaatgaatttacggattcataatggcaagccagtatatgagggagaacaagtccagatagggggaaatgaatcatattacccagtatgccggaagcactattttcatccccaattaaaacaataggaggaataatcaagaatggaaatggaagaaattttcgataagcttcaagcagttgctgatcgttacgatgaactaaatgaattgatcagtgatccagaagtaattgccgactcgcaacgttttatgaagctttcaaaagaagaaggaagcttacgtgaaacagttgaaaaatataatcaatataaaaaagtcacccaaacgattagtgatgatgaagaactattgcgtgaaacaaatgatgatgacttaacagccttaaccaaggaagagttagcggaagcgcgcgaagaacaagcacaattagaaaaagagcttgaagttctactaattcctaaagaccctaatgatgataaaaacattatcatggaaatccgtggagctgccggaggggatgaagcaagcctctttgctgctgatctatataacatgtaccttcgttatgctgaaaagcaaggctggaaagtagaagttgtggatcgaaatgaaactgaagtcggtggctttaaggaaattgccttaatgattactggggataaggtttattctaagcttaagtttgaaaacggtgcgcatcgtgttcaacgggttcctgttactgaatctgctggacgtgtccatacgtcaactgcgacggttggggtaatgccagaagctgaagatgtggatgtagatatcgatcctaaagatatccgggttgatgtttaccgttcaagcggtgctggtggtcagcacgttaacaaaacttcatcagctgttcgaatgacccacttgccaacagggattgttgttgcaatgcaagatgagcgttcacaacagcagaaccgggctaaggcaatgcggattttgaagtcacgggtttatgattattaccaacaacaagaacagagcgcctatgatcaaaagcggaaagacgcgatcgggacaggtgatcggtcagaacggattcgtacttacaactacccacaaaaccgggtaacagatcaccgtattggattaacattaaataagcttgataagattatggctggtgacctcgatgaaattattgaagcattgattgttgccgaccaaacgcaaaagttggagcaattacgaaatgagtagtttcgtaccgaccaactactttatggctcagcgatgggcaaaagaacaattacaaggaacaaatattgacccaagtgcccctcagtttttacttcagcaatcacatggttgggatgcgactcacttacttttgcataatcgtgatgagatgccagctgacgaagtagactggtggaaggatgccataacaagattgcttaatcatgagcctgctcaatatattgttgggcaggccccattttatggacgaacttttaaagttaataaaaatgttttgattccagaagctgagacagcagagttaatcgattgggtgttgcaagaaatgccatctcgcccattaagaatccttgatttaggaacggggagtggagtgataggcattacccttgcacttgaacggccaaattggcatgtaagtttaagtgatatttcaaccgctgcgcttgctattgctcaggaaaatatggctaagtttaacttggagttgccgttaattaaaagcgatttatttgaaaatattgatcagcaatatgatttaattgtgactaatccgccttatattgacccagacgatactgatgaaattgatcaagcggtccttgaaaacgaaccagccctagccctatttgctagtgaacatgggttaggattctatcatcgcttatttaagcaagcagggcaatacctaactacaactggtcaaatatttggcgaaactggttatgatcaagaggagtcaattcaagaattactacatcaaaccgatgaacacgcacagatatgcccacgacatgatgtggcaggaaaaatgaggatgatacacgcatgggatttttcaaacgtaggaggaagatagtaagaatggatacgaagatttttcgacatggtgagattgcccaagcagcagctgcgattaagcgcggtgaattagtggcttttccaaccgaaactgtttatggattaggggctgatgcgaccaatgaaaaagccgttaagaatgtttatttagcaaaagggcggccaagtgataatccattgattgttcatgttaactccatcgcaatggttaaaaagtatgctgccgagattcctgataatgcccgaaagttgatggatgcattttggcctggttctttaactattatcttgaagattaagaagggcgcactttcaaaaaccgtcacaggtggtttgaaaactgttgcctttcgttaccccgactgtcaaccaacccttgacttaattgaagaagctggtgttccgatggtgggaccatctgctaatacttctgggaaaccaagcccgactactgcccaacacgtttatcatgacttgcatggtaagatctctggaattgtggataatggtccgacacgggtaggagttgaatccactgtccttgatatgtcaacagaccaccctgtaattttacgtcctggtgctgttacgaagaaggacattgaaaaagtgattggatccattgaccttaatcatcataaagtaggcaaaaatgaaactcctaaagcacccggaatgaaatacaagcactatgcacctaaggcccaagtatatattgttgatgaagatactgattgggataaagttgttgaatggatacgacaacagccatttgacgttgggatgatggctgaagaaaaggttctccaacaagaagtattgccgatgaatgctattcaattttcattaggaaaaaatgttcaagatgccagtgctcgtctatttgatggcttacggcaatttgatgaccaacctaatgttaaagcgattgtcactcaagcatttccagctcatgatttagggggcgcatacatgaatcggttaaataagtcggctggtggtatgcactttgataggaatgcggtaaaataataagggaacgtagtggaagaggtaccactccctaattaaaatctcaataaaataataaagagactgagtaggattcccagcctctttatttataaccagaggagatgttgtaaatgaactatggtaaaaaatcaccccaattatgggcagccattgaaaatgaagaacaacgccagcaagatacgattgagctcattgcctccgagaatattgtttcagatgctgttcgtgaagctcaagggtcagttctaacaaataagtatgctgaaggatatcctaataagcggtattacggtggttgtgagtttatagatcaagttgaacaattagcaattgattatgctaaaaagttattcaatgcagcatatgttaatgttcaacctcattccggatcacaagctaatatggcagtttatcaagcacttctcaagcccggagatgtgattttagggatggggatggatgctggtgggcacctaactcacggagcaacggtcaattttagcggaaaactatataagacgtatggctatggcctaaatccagatactgaagagcttgattatgatgaaattatggcgttggctaaaaaagtaaagccacaattaatcattgcgggtgcttctgcctatagtcgaattattgattggcaggcatttcggaagattgctgatgaagttggggcttacttgatggttgatatggcccatattgccggattagtagcaactggtgtccatccaagtccacttccaattgctgatgtcgttactactactactcataaaactcttcggggcccacggggaggaatgatcctctctaaatcgactaaattaggacggaaaattaattcagcagttttccctgggatccaaggcggaccactggaacatgtaattgcggggaaagctcaagcattttatgaagatttgcaaccagaatatacggaatatatccaacaagttgtaaaaaatgctcaagcaatggaaaaagtatttaatactagtaaacaaattaggatggtttcaggaaaaactgaaaatcatcttctcgttctggatcttactaagactggtttaacaggaaaagatgcgcaaaatctccttgaccgtgtctacattacaaccaataaggaggccattccgaatgacccacgaagtccatttattacaagtggtttgcggattgggactcctgctattactagccgcggatttaaggaagaggatgcgcaaaaagttgcggaattaatcagtacagctttaactaatcccaccgatgaagagtgtctacaagaggtcgcaaaaggggtacacgaactaaccacaaattatccgcttaactaaaaaattagaatataaaaagttgttaagatcctttgtcatgacttgatttttttggtagaatagtgaagaaattcaaaggagtgtatataggcatgggtaaatttgaagtgttagatcatccattgattcagcacaagctaacaatgattcgggataaaaatgttgggacaaagtttttccgggaaactgtcaaagaaatttcaactttaatggcttatgaagttgcacgcgatatgccattaaaggatgttgaaattgaaacgccaattgctaaaacgacccagaaagaattggctggtaaaaaggtggcgattattccaattcttcgggccggaatcggaatggttgatgggatgacggaccttatccccgcagctaaaattggttttatcggaatgtaccgggatgaagaaaccttaaagccacatgaatactttgttaagttacctaatgatattacagaacggcaattattcatcgttgacccaatgctggcaactggtggttcagcaatgatggcaatcgaagccttaaagaagcgcggttgctcagaaaagaacatgaaatttgcttgcttagttgcagcccctgaaggagttaaggctgtgcgcgacgcttatccagatgttgatatttatacagcaggacttgatgatcatcttaatgaagatggatatattgttcctgggttaggtgatgctggtgaccgtctttttggtactaagtagataattaagaattaaaagcatgatctgtagaaaactttttagctttcgcaaattttgcttttatttttttgtttgtgttgaaaaggctttcgcttataataggtactataccagaaaaggggaattgattaatggagacccaaattaatggaattgcagccagtgatggagtgggaattgcacctgcttacttattgacgaagcctaatcttagttttgaaaaatatcatattagtgaccccgatagtgaaaaagcgagattgcactatgcttttgagaagatcattcagaaactaaaggaaaccaaaaagaagcttgttaataaacttaatgcagaaaatttggcaatttttgatacccacattgcaatcttaaatgatcctgaaatgattaaacaagttgaaaaccggatcaccaatcaacgcttaaatgcagaatcggcttttgcagaagtaattactaagatgatcaaaacccttcaggcgatgactggaaatgaatatatgcaagagcgggcatctgattttcaaaatattcaagaccaggttttagcagagttagaagggaagaagctccctaatttacgtgaattagatcaccctgtcattgtagtcgcccattcgattggtccggccgatacttcacagatggatggccgctttgttaagggaattattactgatttgggtgggcggactagtcacgcagcgattatggctcgttctttacagattccagcaattgttgggtgtaacgacataaccaaaaaggtgcagaatggccaacgagtaattgttgacggctttgaaggcagtgcaattgttgaaccatcaacaaatgatgttaaacaataccaaaaaattactgataagtttatgaatgtccgtcagcaatggaaaaaaatgattaaccagccctcagtaaccgccgatggtcaacggtacaagatttcagctaatattggttcttcagtggatatttcgtcagcaatagaaaatggtgctgatggtgttggcctatttcgaaccgaatttctttatatgaaaagtgaccaccttccaaccgaagaagagcagtttaatgcttatcgccgagctgttgaacagttaaatgggaaacggttagtggttcggaccttagatatcggtggagataaaccacttcaatttatgcccttacccaaagaaatgaatccattccttgggtaccgggctattcggattactcttgatcgaccagaaatgtttaggactcagctgcgggccttactccgagcatccgagtttgggaagattaatattatgtttccaatgattaccacgcttgaagaattacgagcagctaagaaaatctattatgaggagcagcagaaattagctgttgatcatccaggaattggccgcgatatccatcttgggataatgattgaagttccattagccgcgttaaatgctgatcgcttagctgcagaagttgatttctttagcattggaactaatgacttaatccaatattgttttgcggctgaccgtggtaatgattcagtttcgtacctttaccagccgctaaatccaacttttttaaaattaattaagcacattatcgatgctgggcatgctcataatacaacggtagcgatgtgtggagagatggcaggagatcattatgcgttgccactattaatcgggatgggattggatgtctattcgatgagtgctagttctattttacggacacgttcaatgatgaagcaattagacagcaaaaaatgtcagaaactctaccaacaggctgttacaacttgtgattcaatgaccggtgtgaaaaagttagttcaagattggttggtagcaaactaaaaaggatttaggaaaagtaaagatttttcttaaatcctttttttatctcttgttaagagtaaaatggcaatagttttgctgtactagggggatgtaaagttgtgattaagcaatactggacaaagcaaagaatctggttgttaatttttttaatggttgttggaattggtgctctcttatttaccagccataatgaacagttttatcaacaaccaattgctaaagtaatcagcaaaaaaacgatgagtaaacaaagagtaaaagaccagtttgataatgttgaccatcaatataatcaacaactccaagtaaaactaatgaatggcaaatatcgcgggcaaaaattaacagtccaaaatacatatagcgattcgcaaccgatggatcaacgttatcgggtaggaaatgaagtatttttaacccagcttcgcaaacgaggcggaaaactgaccgccaatgttaacggttataagcgagacacagtaattgtctttttactttggcttgttgtcttgatgctgcttctccttatggggcgttcagggatgtttgcattcttaagcgtagtaattaatgctcttttgtttataattgcaattgagatcgacttaaagcaaaatggtcagcatatcatgctgctttttagcgttcttgccataatttttacgtttattagcttattattagttcttggttttagtaaaaggatgctggcgacttttgcggcaacagttattggaacatttgttgccttgggagtaagtatgcttgtatttatgtggacgcatgaacgggggatttactatgaatcaatggaatatgttacgcaagttcctcgaccgcttttcttagctgaaacattgttggggtctttaggagcggtaatggatgaatcaagcgatattattgccacactttttgagttaaagcagttaaatccagctgttacccgcaaacagttatttatctctggccgcaatgttggtaaatcaattatgggaccgttaataaatgttttgtttttaatttttatggtggatacctttactggtagtcttttgtatatcaaaaacggtaactcgtggggatatacctatgcaatgaatatgagcttagggactattcagagcctgatcagtgggattggaattgtcctttcagttccccttgtcagtctatttggggcattattattaggtaagaaggtgcaaaaatgacgacaattacgggccttggcttagtattgctaattttgatggtccttgtgggagggaaacagggctggacagcttttttaagcttgcttcttaattttggctttttatattttgcaattattttagtcgcgtttcatgttcccccgttatttgtaacggtaactattgggattacaattttggcaataactattttcatgggggaagatgatttgcggacaaccgtgacggcattttatgcttcactcatcgtgctatgcttaattttagtgctgatctttattgtcgagcactgggcaatggtgcagggctttggaacagaagatagtgatgagttagaagggatgtcaattttaattggaattagttatttcaaagtttctgttactactactattttgagttcactcggagcaattgcagaagcggcgatggcgatctcctctggccttaccgaaatccttgagaatcatcctgaaagaactaatcgtcaattaattcatagtgggatggcaattgggcaacagattattggaacaacatttaatacgcttttctttggcttctttggaggattcttagcactatttatttggttcttaggtctccattattcctttggtacaattatgaataacaaaatttttgtggcagaaatgattgaaattctgatctctttcatcggggtgctgatcactgttcctatgaccgcttgggtgatgacaaagcgtcgtaaagttagtgtaagattttcataggttggatgaataattcatctggtcgtggaaatcttttttgtagaccaatttacttatttacaaaaaaagaaaagaccagtagcctttagtgtgtcgaatactaagcaaaggcaggtctttcctcatggatattttaacagaaatcgagcagaatttggtgaaatcaggcagtttatttgaagctgaacagattattttaaaaggggtattggagttaggacaagtaatcatgcaaaactttttggaaagcttagatcgaagcttaaagtcccaagctccagcgaactatcaagtaattaataaacagccacggacgcttaattttatctttggcccggtgacttttcaacgacggtattatcaggctgggacaaagaaacgtgaattttacttagaccaacaattaaaaattaaaccacgtcgtcgtttatcgccacaatacttaatgatgatggctaagattgcccaaacaactacaatgcgcaatactgccgacattttgaaccttgtatttgacagcggaattactgccgattcggtaatgcacgccgtgcatgagttaggaaatcaggtagctaaacaaactcaagcaaaagaacaccaagctactcctcgccatatgcctaaaaatttaactattgagggtgatgcctttatgattaaaggtaaaaaagaagcaggtcagctgactcttgtgcaccattatcgggtttatgagcgagtagctaatcaaatcattaatcggcatgactttctcagtgttgggcaccaaggacggcttgaagcacgactaagtgattatttagaccgccattataagcttgccggtcaaacgatctttttggccagtgacgctggcccaggttacgaaccagctaagctattaagtctagttcctcaaggtgcacatggtgaatactttctcgaccgctatcattgtttacagaaaattgaacatactttaggccggcacaacgagttagccatgcgagcaattaaagccgttcgtcatcatgatcaagcagagctaacaataattttagatacttatgaatcacaaaacctaacggaaaaacaagcagacgacctaatgcgtttaagaaagtatctacagcgaaattggcggtatatcctctcaccacaaatgcgtggatttaaggatattcatttaattggttcagtcgaaagttctcaccgggcttttacttaccggatgaagaaacagggcaagtcatggactaagcagggggctaaagccatgattggtttaattgaagcccgaatgaatggtgaactgcaagctagtttaaatacaatcctagaacaattaacagttcttcctcgagtggctcaaaccagcctattacaggaaatgcatattcgaactggagagtttctaagaaaggcaccgacaaagccgtcaattggagcagtacaaggaataattccgattaacacggccacaagtagaccaatgggacaactttttaaggcactaacccactaaaactgtatatttaaaggctacctatgaaaacttgacagataccgtcgtaaatctgttgttgacaattaccctaaaacaaagtaacatacgaataacttataaatagacctttaatcggagtcctgtgagacttcaaaggtgcggataaattttcaatgctctttccatagatttggattgagtagggaagagacgactttggagcaggaattccaaggccgttttttctttaggaggatttatatggcgcaccgtgataatgttgttttagatgtagatgaacgaccagctccctggcagtggtttggcttatctttgcaacatatgttttctatgtttggctccactgtcttggtcccaattttggtaggattaaatccaggaattgctttatttagttcgggagtaggaaccctgatgtacttactcattactaagcataagattccggcttatatgggatctagtttctcatttgtggtcccgatgatggccttaatgaaaactactggttatccgggtattgcacaggggaccattgcagttgggtgcgtatatttaatcgtatcagtaattgtaacgttggttggctcgcaatggattgaccgcattttgccaccaattgttgtcggtccgattgttgttgtaatcggattatcattagcaggaactgccgctaaagatgctaccatcaattcggctactggccattatgatttgcgcttttttgcggtcgcaatgcttacgatggcaataacagttatcttcaatatgtattttaaaggattcctcggtttaattccgattttgatggggattgtcgctggttatattattgcggtcttatttggcattgtggatttttctccagttgcgcatgcacattggtttagtttgccagactttcagattccatttgttgattatcatccccaattatactggggtgcgattttgagtatggccccaatcgcttttgttaccatgacagaacacttaggtcatattatggttctaaacgagttgactgagcgaaattacttcaaggaaccaggattgaaccatacgcttgcgggagatgggacggcttcgattattgctggtttcgttggcggccctcccgtaactagttatggtgaaaatattggggtaatggcaattacgcgtgtccattcagtttacgttattgctggagcagctgtatttgccatcttctttagctttattggtaaattaagtgccttgattgaatctattccttcaccagttattggtgggatttcattcctactatttggtgtgattgcttctagcggattgcgcgtaatgattgaaaacaaaattgattttaatgaaaaaagaaatttgatgatttcatcggttattttagtaattgggattggaaatgcctatcttcaattaggaaaatatcaattctctggattagctgttgcagctgtcctcgggataataatgaatttaatccttccacaaaaagccaaaagtgaaatgtagtttgaatttttaagcagagtaagaaaaggcatccgacctcttactctgcttttttcgtatgataacaaaacaaaaaaattaagaggtcgtggaaaaaaacagattataagaaaaagtttatcaagtctaagaaaacgctttctttacactcttgtcaattgattagtaggtatatataaacctaatgtttttttgaattttaacgaaattaatgatatattaacattcgtaacttggggtagttcgttttatttgcaacgttcatccaatttacaagccaaattattgttataaggaaagaggtggaatatgaatgggcggtgatgctttaacttttaagcttttcggacttacgttcaatactacgaacattgtttctggactgattatctacgcaatcgtgttcttcactctttacgggatgtcacgaaagatccaaatgaagcctactggtgcacaaaatgtatttgagtggctagttgacttcactaatggaattgtgcgaagccagatgccagcatccgaacaaggtcactatagtttctttgcctttgttttgtttgttttcatcttctttgcaaaccaattcggtttaattttccaattccattggaacggagctgaggtgcttagaagtccaacggcagatccagttgttacgttaacactttctttaatggtaatggtattagcattcgctgctggagtagcacataatggccttggtggatacctgaaagggtacactaaaccatttactttaatgcttcctgttaacattatcgaagactttgctaacttcttaactcttggtctccgtatttttggtaacatttttgccggtgaacttttaatgagtttgattgctaatatggcattctcacatggaatcctaactattattccagggttgttcttggaactagcatggcaaggattctccgtatttatcggttcgattcaggcatatgtctttgtaacattaacgacggtttatatttctcggaagatttccgaataataatccctaaggaggaattttaaaatggcattaggagcaattgctgcaggactcgcggctatgggtgccgctatcggtggtggtatcggtgacggtatcttaatcggacacacagttgacagtatcgcacgtcaaccagaattacaaagtagattacaagcaacgatgtttattggtgttggtttgattgaagccatgcctattattgccatcgttattggcttccttgttatgaacaagtaattattttaagttttttattttaagataaggaggtgtcaatagatgtttgtaaacagtgtgttagctgaatcaaacagtttatacattggtgacttggtattctacatcgttacttttatcatcttaatgctattagttaagcattttgcttggaaaccggtaacagatatgatgaagaaacgtgcagataagattgctaatgacattgataatgctgctcgttcacgtgaaagtgctgaaaagatggctgcaaagcgacaagctgagttacaaagctcacggcaagaagctgctgagattgtaagtaatgctaaaaagtctggggaaactcagcgagcacagattgttgaaacagcgcaaaaagatgcccaagctctcaagcaacaagcacaaaaagatgctgagcaagcacgtcgcgatgcattaaacagtgctaaggatgacgttgcaaacttatctattgagattgcttccaaactcatccaaaaagaattaaaggcagacgatcaaaaagaattgatcgattcctatatcgaagggttggtagaacatgagtcttgataagaagacagttgctgatcgctatgcgaaagcactgtttgaattggtcgatgctgataacgaactcgatcaaacttatcaagaattgattgctttacgccaagtctttgaggacaacgagggattggacgccgcacttgcgggagttcaactgtcacttgatgaaaagaaatcattgattaaagatttacagcaaggtgcttcaaagtacgttgctaacttaattcaaatggttttcgattacggccgtattgactgcatggtcgcaattattgatgagtttgaacggcggtatgaccgtaaaatgaagcggatgcatgctgacgttaccacagcgatccaactcgataaacaacaagaggatcaactaaaggctaatcttgcaaaacgttttggtgctaatgaagttaccttaacagaacatgttgatccagaaattttaggtggggttattgtccatgttgataataagacattagatggtagtctcagctcaaagattaagcaaattcgtcgtttactagttagataaatatatcttttttcaaagaggtgagacctttatgagcattaaaactgaggaaatcagttcactcatcaaaaaacaactcgccaactaccaagacaaagtatctgtcgaagaaaccggtactgttacctatgttggtgatggagttgctcgtgccgatggcttagataatgctatggctggtgagttgctcgaatttagtaacggggtctacggaatggctcaaaacctcgaaagtaatgatgtaggtattgttattttaggggattacacaggcattcgtgaaggagacaccgttaagcggacgggtcgaatcatggaagtacccgttggcgatgcattattaggacgggttgttgactcattaggtcgtccaattgacggtcttggtgagattaagacagataaaactcgtccaattgaacgtaaagctccaggtgttatggagcgtaagagtgttagtgtaccacttcaaactggtattaaggttattgatgccttagttccaattggacgtggtcagcgtgaattgattattggtgatcgtaagacaggtaaaactgccattgcgttagacactattattaaccagaagaaccaagacgtaatttgtatttacgttgctattggtcaaaaggaatcaactgttcgggctagtgttgaaacccttcgtaagtatggagcattagattacacaattgttgtttcagctagtgcttcaaatcctgctccaatgttatatattgcgccatatgcaggggctgcgatgggtgaagaatttatgttcaacggtaaagatgttcttattgtttatgatgatttatcaaaacaagcggatgcataccgtgaactttcattaattcttcgtcgtcctcctggtcgtgaagcttaccctggtgatattttctatactcactcacggttgctagaacgtgctgctcgtttgtctgatgatcttggtggtggttcaatgaccgccttaccaatcattcagacccaagctggtgatgtttctgcatatattcctactaacgttatttctattactgatggtcagatcttcttagattcagatgaattctatgcaggtcaacgtccagctatcgatgctggtacttcagtttctcgtgttggtggtgacgctcagatcaaagcaatgaagaaagttgctggtactttgcgtttggatattgcttcatacaacgaattagcatcctttgctcaattcggttccgaccttgatgcagctacgcaagctaaattggctcgtggtcaacggactatggaagtcttaaagcagggattacatgatccgctaccagtagaagaacaagttgtaacattatttgctctttcacgtggttttatcgataaagtcgaaattgaagatgttcaacgttacgaaagtgaattggctgcttacatgcatgctaaccaccaagacctctacgacaccatcaagaagactggtaagctaccagaaggcgatgacttgcaaaatgctgttgctaagttctctgaaacatttcaaggaactaaaaagcaagccgctgaagaaaaatagttaatgatgattagtcgaaaggacggtgagatttagtgccagcttcactcgctgcagttaaacataagattgattccactaagagtacgcgtcagattacttcggcgatgcaaatggtttcaaccgcaaaactgaatcaaattcaacaccacactcagacctacgaagtatatgctgagaaggttaagcaaatgttgtctgatctggttaaatctcacagcgcaacatctgcagcttcgcaagatgatgtttacgctgcactgtttaaaaagcgcgcagttaaaaagactggggtgcttgtgattacgtctgaccgaggtttggttggtagttacaacagtaacattatcaagcaaacgttagatatgatggctaagcacaatcttgataaagacaacacggtatttctgacggtcggtaaaacagggacagaattctttaagaagaggggaatgaatgtcgtttacgaatattcaggcgttagcgatgttcctacctatcgtgaagttcacagtattgtgaagaccgctgttcaaatgtacagtgatcaagtatttgatgaaatgtatatggtttacagtcattatgttaaccggattacatcaaatgttattgttcacgatgtactcccaattactgaaaagtcattactcaatgacgaaaatgaagcacaagaaaatacagaattaaataattctgatgtaagtactgcgcacgtttctgccgagtatgaatttgaaccgtcagatacagaaatcatttctgcattggttgcccaatatgcagaaagtttgatttatggagcgattcttgatgccaagacatcagaacactcttcaagtgcgaatgcaatgcgttcagctacagataatgctgatgacattatctctactctcgaattgcaatataaccgagcacggcaagcagcaattaccactgaaattacagaaattactggtggtatgactgctcaagaataattttttctaacgtaggaggaaacaacatgagttctggtaaagttttacaagttatcggaccagttgttgatgttgaatttcccttagacgaaaaacttcctgaaattaatgacgctttgaagattaaggaaagcgatggtaagactttaacaactgaagttgccttggaattaggtgatggtgttgttcgaacaattgccatggacggtactgatggtcttcaacgtggtatggaagttgaaaacactggcgcatcaattagtgtaccagttggtgatgatactctgggacgagtatttaacgtcttaggggaacctgttgacaacggaccgaaatttggtcctgatgcaaagcggatgcctattcaccgcgatgcaccaaagtatgatgacttaaacaatgctaccgaaattttggaaactgggatcaaggttattgatttactagctccatatgttcgtggtggtaagattggtctattcggtggtgccggtgttggtaaaaccgttttgattcaggaattgattcataacattgctcaaggtcataatggtatttctgtcttcacaggggttggtgaacgtacccgtgaaggtaatgacatgtactatgaaatgaaggcctctggagttcttgaaaagacggccatggtttatggtcagatgaacgaaccacctggtgcccgtatgcgggttgccttaactggtttaacaattgcggaatacttccgtgatgtaaagggacaagatgttttgctctttatcgataacatcttccggtttacacaagctggttcagaagtttctgccctcttgggtcggattccttctgccgttggttaccagccaacattagctactgaaatgggtcagttacaggaacggattacttcaactaagaagggatctattacgtctattcaagccgtttatgttccagctgatgactataccgaccctgcaccagctacgacatttgcccacttggatgcaactactaacttggaacgtcgattaacccaaatcggtatttatccagccgttgacccattagcttcaacttctactgctcttactccagaaattgttggtaaagaacactatgaagttgctacacaggttcaacacgttcttcaacgataccatgaacttcaagatatcatctctattttaggtatggatgaattatctgacgaagaaaagacaatcgttgctcgtgcacggcggattcaaaacttcctttcccaaagctttagtgttgcttcccaatttacaggtttacctggtaaatatgttccattaaaggaaacaattaaaggctttaaggaaattcttgctggtaagtatgatgatcttccagaagaagctttccggttagttggaccaattgaagacgttgttgaaaaggcaaagaaaatgaaggctgagactgacgaagatagctcagaagactaggagggataattatggctgaaaatacttttaaggtcactattattactccagatggcaccgtctatgataatgataaggttactatactcgttatgaacactgctggtggacaaatgggaatcatggctaaccacgtaccattaattgctgcacttgaaatcagtacagttcgaattaaacattctgaaggcactgatgaagttgcagcggttaacggtgggatcattcaatttgatggtcaaaatgctacaatcgcagctgatagtgctgaaatgcctgaagcaattgacgttgagcgggcacagagagctaaaaagcgttctgagtctgcaatcgaagaagcaaagaagaagcataaccagagcgatttatcacgtgcagaagttcacctcaagcgtgcaattaaccgtttgaatgctgcttctaagcaacgcaatatctaaggtataatatcaaaaagaggttggagaaaataatccaacctctttattattttaaagtgtaaactgctaaaacgcagtagctgcctaactatctttacggggtgggactaaaaactcgcaagcaatttagtctcacttccttttcgtttaaaagatcattaagcttttttacgaattaataatttaatcatgtgatatgatatgattgaatttagtttaaaagagggtgatcgattgcaaattacaggattacgagcgctaatagaaataatagtgcaactggcatttgtctggttagcgttttttgctattcaagggatacattttgagcatttttttaaccgaccaccacgtacattgcctctacttattgttctgatggctactggactaggatatttatgtgcgacatttttcttaaatatcctaagtgcaattggtaatttgacatatttaattcgatagtatttactggaggatcttatggaaaaaattgttgttaagggcggtcagaggttaaccggtcgagttaaagttgaaggagcaaaaaatgcagtcttaccaattcaagcggcatctattttggcttctagtggaaacattaaattatcaaatgttcccattttatcggatgtaacgacaatgaatcagttattacggttcttaaatataaaagtagattttgataaaaataagcatgttttaacaattgatgcagctgaccctgtattatctgaagcaccattagaatatgttagccggatgcgggcatcgatggtagtcttaggccccttgctagctcggacaggtcatgcgcaaattgcgcttcctggtggatgtgcgattggttcgcggccaattgatttacatcttaagggattacgtcaattaggagcggttattgagcaacacgatggatacttagaagcacgggctgaacacttaattggtgatcatatttatctagattttcctagtgtcggtgcaacgcaaaatctgatgatggcagcaacccttgcgcagggaattacaacaattgaaaatgccgccagtgagcctgaaattgttgatttagcaaatatgttgaataaaatgggtgcacgtgttcatggtgctggaacagacattatccggattcaaggggttaatttccttcatggttgtgaacatacagtaatgccagatagaattgaggcaggaacatttatgattgcgacagccattactaatggtgatgtagtggttgaaggagcaatcgctgagcataacacctcactaattgctaaattggaggaaatgggggtgacagtcatcgttcaagaagacgggatccgtgttcttgggacttctgttctaattcccacgaatattaagactcttccatacccaggatttcctactgatcttcaaccacaaatgtccgttctccagcttttggcaaatgggaccagtaccctagatgagacgatttttgagaagcgttttatgcatttagaagaattacgacgaatgaacgccgattttcaaattaatggtccagttgcggttttaaatggtcccacgcgttttagtggcgctgaagtagctgcctctgatttacgagcgggggctgctttagtattggccgggttagttgctgatggaattacccaggttcgtaacctaaaatatattgatcggggatattaccatcttcaccaaaagttacaacaattaggggccaagattgatcgaattgatgtcgaggataaaattaaattggcggtaaagccttctaagaataaaacaaatcaagattaaagattcgtaagcgacgtctatctatatccctattttgtggtataattacgaacggtattaacgagtttagtgttaaaacttaactagctaaaaggagaagaaattaatggcaaaggatattggaattgatttgggaactgccaatgttttgatttatgttcaaggcaagggtattgttctaaatgaaccgtcagttgtggcggttgatacaaaaaccaataaagtattggctgttggttcagaagcataccgaatggttggacgtactcctagtaacattcgggctattcgtccattaaaggatggagttatttctgattttgatgttactcaagaaatgctttcctactttattggtaaactaagcgttaaagggtttatgtcaaagccaaacatcatgatctgcgcaccaacgaatattactgagattgaacgaaaggcaattattcaagccgctgaacaatctggtggtggtaaagtttaccttgaatacgagcctaaagtagcagcaattggtgctggattagacatttttaaacctcgtggaaacatggtcattgatatgggtggtggtaccagtgatatcgccattctttcattaggcgatattgtctcaagccagtcaattcggatggccggtgataagatgaatagtgatattgcttcttatattaagaataagcacggcctagtaattggtgaacatactgctgaaaagatcaaaatggaactcgggactgcattacgggttgatgatcctaaaacaatggatgttcgtggtcgtgatgtagctactggaatgccaaagcaaatcacggttaatgaaaatgaaattgaagaagcattgcacgatacgcttgaacaaattgtttcagccgctgtaaatgtattagaaacaattccaccagagttagctagtgatattattgaccggggaataatgttaaccggtggtacttctttgttaaagggtgtcgatcaattattcagtgctcgtctaaaggtaccggttgttgtttcacaagacccattagacaatgttgctaagggtgctggtgaaatgttagaacggatgcaaaagactgaacgaaagaagtaagttgaaatggtaaggattttatgtgaccttatacgctggtatcaacaaggcatttccgcccaacgaccatttcgcgtatgtcgctttaccccctcatgttcacagtacatgttagaagctttacaacgctttggtttaaaggggatgttgctcggaagttggcggctccttcgttgtcagccgttttctcgtggtggctatgatccggtacctaatcattttacttttcgtcgtcaggggtaataatagttattaagggtgaaaaagtgtcaaagaaagataaaaaagtagaagtcagcgttaaagatattgaacgtcgtaatcaaccggttcaacaaatttttattggagaccgattgattggtgaagttgtaaccgataatgaacgtttcaaagcaatgctgataagtgaccagagcgaattttatgttcgttctcaagaagagggattagaaatagtccttcaacaatatcatcttcaccagcattagtttggtgaaccatcctctttgattaatattttgtaaaggagtttggtaatgcaacgttcgcaaaatgatgtagaaagtcggattgactggggaattatattttgtgttcttttgttagccttgattggtcttgcttcaatctatgtagcggcagttcatgatcggcagcaaactagtgtagcacgacaggttattacccagttggtttggtatgcggttggaacaatccttattattgtcattatgcaatttgatgctgaacaattatggaaattagcaccaattgtatactggctaagtgtatttttaatgttcgcaatcctagtattttatagtcgagcctattatgctagtaccggggctaagagttggtttgcaattggaccatttacgtttcagccttcggaaataatgaagcctgcctatattttaatgatggggcgtgttattacgactcataataaccgatatagtgtgcatactgttgattcagattggcgattaattgggacgatgttcttatggctattaccaattttaatttcgctgaagtttcaaaatgactttgggactgggttagtattcttcgctattttctgtggaatggtcttagtttctggagttacttggcgaattttggcgccagcagctacgatattagttgttgttgggggctcagccttagcgatggtaactagttcggttgggcgacaaatacttgaacatgttgggtttcaagcataccagtttgatcgggttgatacctggcttcatccagaacaggatacaactaaccaagggtatcagttatggcagagtattaaagcggttggttcgggtggtattactggaactggttttaataactcaaaggtttatgttccggttcgtgaatcagatatgattttttccgttatcggtgagaattttgggttcattggtggggttttattaatccttatctacttgttactgatctacttaatgattcgagtaacattcgataccaagaacgaattctatgcttatatctcaactggagttatcatgatgattttattccacgtttttgaaaatattggaatgaacatcggtctattaccattaacaggtattccgcttccatttattagtgctgggggatcctcattaattggtaacttgattgggattggaatggtaatgtcgatgcgttaccatcatcattcttatatgtttagcagtaatcgtgaatttagatagtgaggttataaaatggcaaaagattatttttgggtaaaagagcaagcagatggtactaagcgtgtcggcttaaacgatgaaggccgtgatgagttaggagaagtaagtttcatcgatgtaccagcagtagggacaactttgaaacaagctgacaaatttattgcagttgaagcagaaaaagcagttaccgatgtggatagtcctattgatggtaagattaccaaaataaatgaagctattattgatgatccggctggattaaattcaagcgatatggaaaaaaactggattgttgaagttaaataaaaaataggagactaggattaggggaaccttgattttagtctcctatttagtattggcggatctttccagttcatgttatacttaaggttctaggaaaacggctaagataaaaatatttaaggtggtatttattatgaccaaaaaattacacatcgctttattatttggtggtaactcctctgaacatgatgtgtcaaagcgatcagcacataatatctatgatgctcttgataaggaaaaatatgatgtaagtctttttatgtttacaaaggatggaattctattaggcaatgaggattctcaaaagatctttgatggtgaacctgaagaccaagtggtagcagaagcatatcaaaagatggatatgagtagtccattagcaccaattatggccttaaacgaacaaaaggaaattgatttcttcttccctgttatccatggtaatttaggtgaagatggtacaattcaaggcctctttaagctccttaataagccatacgttggttcaaatattgcagctagtgcgatgtcttttgacaaggatcttactaagaagattattagtcaagctggtattcgcaacaccccttatgtagtagttacgccagaaaaccgggctgattattcatggagccggattgaagaaaaattaggtaatctcacttttgtaaagccagctaagcaaggttcctccgttggaattcatcgagttactaacgctgaagaatatgaaaaagcgttagatgatgcttttaagtatgattacaagatcttagtagaacaggggatcgctaatcctcaagaaattgagatttcaatcttaggaaatgaacatccaattgcctctaagttaggagctgttcgtgtacctaaggacgatccattctatgattacgaaaacaagtttgtggatgccagcggggttgtttttgaacttcctgttaaattaccacaatacttagttgatgaaattacagatatggctttgaaagcatacaaggcattaggaatgaagggaatggctcggattgactttttagttgacagcaataatgtcccttatcttggtgaaccaaatacattaccaggatttactaacattagtctgtaccctcaaatgtgggaagtttctggtatttcatattctgacttgattgatcggttaattcaattaggattacaagaatttgaacgaaacagcaagattaaatacgacttccgtaagcttggtactgaacgtgttggtcaaaagaaatataacgaagactaaagaataattatttaatggttaggatgttgtgaagacaatgtgctaactatttttattattaaaattatagcaggaagtaaatattatcgtaatggtatgaaatccgtggtttagtattgcagtaagcaaaatttataatataatgaagatacgtagtttttgtaagcgttagagtagcttacagtcacactacttatagtactttataaccatcgcagggggtgactttgaaggtggttataagcatttattttttataaaatttattgtattttaagcataaaaatagtattgatttatttttggtctataataaaagacctaggtaaagccaaagtaatttttgttgctgatggtggtataataccattggcaatggtacagttcatagagtacatattttatattcaacaattatgattaaggaaggtaaacaatgagactccgaggagacgtattaaaacaaattcgtcgcaagcgtggattgtcccaaacggctttagctgaagggatttgtactcaagcgacaatcagcctaatggaaaaacaaaatcgcttacccaaaatggatattttaacggcaatatgtgaacgcttaaatatttcttctgatcgaattgtcgaaaatgaagttagtggaattaatgaaacattcaaccaaatcgttgataatttgatttcacgcaattttgaagatgcttcagcgcttttgaagaaggttcatgtaaaaaatctagaaagtgattttgataaacaacgttactactatctagtaggaatggttcaagttgaaagtaatcaaattgatgaagccatttttaattttgaacttgttttaactcaatttgctactactagtgctaatatttatttagctatgacaactgcaggaatggcgcttgcttacttaaaacgtggtgataaagaacgggcagcacggttaactaaccggtctgtaaaactgattgataataaaaaattgattgggagcctttatcaatgggcatcaattgattgtcaaattgcagaattatatctgcaacttgaagaccctgataacgctattgaagttgctaataagggaattgaactttgtcgggaacatgattcattattcttattagatgaactatatctttgtataggtcgtagctacatcctaaagaacgacaaggaagaagctaaaaaggctttaaagattgctgaaagtcttagcattgctcgtaatggatcagtagcagaagatacaattctattagagttaaagaatttagaaatttaattaatatacgtaactgaaaaacgaagctgagagatggttaagatgtctcagcttcgttttttagtataaatttaaatatttatccgtacaaataattaataaaaacttaattgattattaaagactaatttcagtttatgtgcattaaacgagaattagtcttttttagtagtaaaaaaataaaaatatttttcacatgcataactgcttttaaatacaagatagacatgaaattgttaaatgtataaaatgctttttcacaattggttatgattaattttaaataattcacttgatttatacgtacaaatattttatagtaataattgttcaatgaaagcgcgttcatgttcatgaaaaactattactttttaatttttaaggaggatgaatgtaatggctaaagccgagaagaaaatatcaagtgcatttatctacttcttcggatcatttgggggcatcctatttggttacgatatcggtgttatgactggtgccttacctttcttacaagctgattggcaccttgaaaatgcagcttctctagttggttggattacttcagcagttatgtttggggctatcttcgggggcgcattagccggacaactttctgataagtttggtcggcggaaaatgattttaatgtctgcgattgtattcatggtattctccgttttatctggtgtttcaccagacatgggcgaagcaagtgcctattatctaattattgttcggatgcttttaggtttagcggtaggggctgcctcagccttagtaccagcttatatgtctgaaatggcaccagctaaagcacggggacgtttatctggacttaaccaaacgatgattgtttccggaatgttattatcatatgttgttgacttcctattgaaagaccttcctggtgaatgggcatggcgtcttatgttaggattggcagctgttcctgctttaatcttattccttggtgttcttcgtttaccagaatctccacggttcttattacgtaaaggtgatgaagcgcaagccaggaaagttctttcttacattcgtaaaaatccagctgagattgaccaagaattagcaagtattaaagaaaccgctaaagaagagcgacaagcaaatcaaaagacaagttggtcaaccttattcagtggcaagtatcgttacctagttattgctggggttggggttgcagccttccaacaattccaaggtgcaaacgcgatcttctactacattccattaattgttcaaaaagcaactggccaagctgcatcttcaaacttaatgtggccaattgttcaaggggttatcttagttgttggttccctggtttacatgtggattgctgataaatttaaccggcggacattgttgatggttggtggtgccgtcatgggactttccttcattcttccagccgttattaattggatgataccaaatatgaatccgatgacgattgttgtgttcttatgtatctatgttgctttctactccttcacatgggctccgttaacatgggtgcttgttggtgaaatcttcccactagctatccggggtcgtgcctctggtttagcttcatcatttaactggattggatcatggttagttggtcttatcttcccaattatgacggcaagtatgccacaagaagctgttttcgcgatcttcggaattatctgtatcttaggagttatctttgttaagacttgtgttccagaaactcgtgggcacactcttgaagaaattgaagagcaaggaacaaaccatggtcgagtaaaggccagcaatcctgaaaactaggaggaatactctatgaatttacgtgaaacagcgacacaagtaaaaaatggtcaggcttcactaggaattgagttaggctctacccgaattaaagcagtcttgattaatccagattttgaaacaatctcttctgggagctatacctgggaaaaccaattgaaagacgggatctggacatacccgctggatcaggtttgggaagggattcaagctgcttatgccaagattaaggcagatgtccaaagcaagtaccatgtgagcttggatgaaattagttcaattggtgtcagtgccatgatgcatgggtacctaccatttgataaaaataaccaattacttgttccatttagaacctggcggaataacatcactgaggaatccgcagataagttaactgatttatttgattttaatattccacaacgatggagtattgctcacctctaccaagcaattttgaacaaggaaccgcatgttaaagacattgatttcattacaactttagctggttatgttcactggaaactttcgggtgaaaaagttttaggaattggggatgcctcaggagtatttccaatcgatgatcaaacattaacttatcatcaagactttattgacaagttcaattcattaccagaagttgaacaatacccatggcaacttaagaatattttgcctgccgtccttgtagctggctgtgatgctgggcacttaactgctgatggagcaaaattacttgatccaagtggaactttacaagctggtagtttgatggcccctccagaaggggatgcaggaactggaatggttggaactaacagtgttcgaaaacggacaggaaatatttcggttggaacttcagccttctcaatgaatgtgttagatgctccattaaagaagcttcaccgtgatattgatattgttactacgccaaccggtgatccagtagccatggttcatatcaataattgttcttctgatattaacgcctgggttggattatttagagattttgctaatacaattggagccaagatcgataccaatacgctttacgagaccctatttgattcaacggttcactccgacccagatgctggtggattaattaattatagttatctttctggtgaaaatattaccaagattcaggaaggacgtcccctatttgtccgtactccaaatagtaagatgaacctcgctaacttcttccttactcaactctatgcagcatttgcgccattgaagattgggatggatatcttactaaatgaagaacacgttcaaaccgatgtcatggttgcgcaaggaggactctttgggacaccagttattgggcaacaagttttggcgaatgccttaaatatcccaattacaatcatgaatactgccagtgaaggtggaccatggggaatggcggttcttgctaagtatgctgagacgtacggaaaagaatccctagcagattaccttgacgaaaaagtctttaagaatccagaaagtatgacccttacaccagaacctgctggcgtaaaaggatatgaaagctttattactcgttaccaagcaggcttacctgttgaagcattagctggtgatgacattaaagaacgtgaagagaaagggagtaaatagtacatgttagaagatttaaagaaagaagtttataaagcaaatatgcggcttcctaaactaggccttgtttcctttacatggggcaatgtttcagggattgaccgtgaaaaaggattgtttgttattaaaccttctggagttccatatgaagagatgaagccggaagacatggttgttgtcaacttggatggtgaggtagtcgagggtgacttgaatccatccagtgatactcctactcacacttacctttataatcacttcccaaagattggtggagtcgttcatactcattcaccatgggcagtagcgtttgcagctgcacggatggatgttccagcaatgaataccactcacgctgatactttctatactgatgtcccagctgctgatgctttgacgaaggaagaaattgaagaagactatgaaggtaatacaggaaaggtaatcgttcgttcattcaaggaacggggtttggactatgaagcaacccagcggcattagtaatgcaacatggtccatttacctgggggccaacacctgacaaagcagtttataatgctaaggtgttagaagttgtggcagaagaagattatcatgcaatgcaattaacgcaccaagaccttcacttacctcaatacttgttggacaaacactattaccgcaagcatggtgcgaatgcatattacggacaaaataatgcgcattcaaaagatcatgcagctcacgcttaattaatttggtagctacatttaaaaacttttttaggataaaaggagtgtaatctcatggatattaagaattacgaattttggtttgttactggtagtcaattcctttacggtgaagaacaattaaagtcagttgctgctgatgctgaagatattgttaataagttaaacgaaagtggtaagttgccttacaaggttgtcttcaagggtgttatgacaactgctgaaggaatcactaagtttatgaaggaagctaactacaatgacaacgttgccggtgttatgacatggatgcataccttctcaccagcaaagaactggattcggggaactaagcttttacaaaagccactgcttcacttagcaactcaatacttgaacaagattccatatgacaccattgactttgattacatgaacttaaaccaatcagctcatggtgaccgtgaatatgcttacattaacgctcgtttacaaaagcataacaagattgtttacggcttctggggagatgaagaagttcaagaagaaatcgctgactggcaaaatgttgcggttgcttacaacgaaagctttaacattaagattgttcgttttggtgatacaatgcggaacgttgccgttactgaaggtgacaaagttgaagcccaaatgttccttggctggactgttgactactggccagtaagtgacttagtagaatatgtaaatggtatcagtaaagaagaaattgatgctgcttacaaggacttagcaagtcgttatgaaatggtccaaggtgataatactaaggaacactatgaacactcagttcgttaccaacttcgtgaatatcttggtttgaagaagtttatggatgaaaaaggatacactggctttaccaccaactttgaagacttgcatggccttgaagaattacctgggttagctgctcaattattgatgcgtgatggctacggctttggtgctgaaggtgattggaagtctgccggaatggatcgcttattgaagattgctgctgataatgttgctactgcctttatggaagactacacattagaccttcgtccaggtcaccaagcaattcttggttcacacatgcttgaagttgacccaacaattgcttcagataagccacgagttgaagttcacccattagacattggtggtaaagatgacccagcacggttagtatttactggtcgtgaaggtaaggctgtcgatgttaccctttcatacttcaacgatggttacagggttattggttactcagttgattgtcataagccagaagctgaaacgcctcatcttccagttgctaagcagttatggacaccaactgttggcttaaaggaaggtgctgaacgctggatgcatgctggtggtggtcaccacacaatcttgagtttcagtttgaaaccacaacaaattaaagatcttttcggaatgttagatgttaaagttgattttattgaatagttaattcaaattaaaaatcctcaaaatggttctactcggcaaacctcgagacgagtagaaccattttttatcaggagatggaaaaataaaaactgaaaaagagaaaatgctagcagaggaagcttttaacgtttacgatcccgaattagttaaagagcgtcaatatgcccgtcaattagttgagcgatttaatgctcttggcgagatgaacccgactgcaagcaatactgtgattcgtcaattgtttggacacgttggcgaaaaatgtgaagttcatccgcaattcaaatgtgattatggttataacatttatgtagatgatgattttttcgctaattatgattgtgtcatgcttgatgctagtccaattcggattgggaagcattgtttattgggaccgtgagtgcagatttatactgttaatcatctcttgaacccacgattacggcgcaatggagcttacggccaaagtaaggatgtcactattggggataatgcgtggattggtggcggggcaattatttgtccaggtgtaactttgggtaataatgtaattgttggtgctggaagtgtagtgacaaagtcgtttggtgataatgttgttattgcgggtaatccagcacggatcattaaagagaatccatatgtagaataattgattatttcccaggttatttttaatgcaaaaagggaactaagatatggtcatgtgacggccgttatcttggttccctttatcattcttaatatttaaggttatattcgtaaactagtgctggttctttacctacgcgtgtaaagttatttaagttattaatagcagtcatttcctcgtcgcttaatgtgaagtcatagatgttaatattttgcttgattcgcgcttcatgaactgacttcggaatgaaggcgaccccgctttgcaaatgccagcggaggacaacttgagcagcagacttatgatggttagcagcgatcttattgagggttagattgtcgaggatggttccacgcccaagcggactccacgcctgggtaacaatatcatgttccttatcgtattggagcaatggttgttggtttaggcgaggatgacgttcgatttgattaataacgggcatctcatgcgcttgagtagcaagatactgaaggtgaatcatttgatagttactaacaccgattgaatgggtcagaccttccttttttaattcttcaagggctgcccaagtatcaaagaaagctcgctcaattggccaatgaataagtaaaaggttaacataatcaagcctcaacttttgaagggagtctttaacagaggcaattgtttgcttaaacccttgattaggttcagatacttttgtggtaataaaaaggtcctcacgaggtaaaccaagctcttgtaaggcgtttccaacctctgcttcgtttttatataattgcgcggtatcaaaaagacgatagccagcatcataggcatactttatcgcggaggtaatcgtactttgatcagtaattttatataagccaaatccttcttgaggcattgattgaccatcagcaagtaataattgttttatcttattattcattgatattctcctttgtaataagcgaagtggtcgattgtcccttaattattgttggggtataaacttttgaagtgacttcttcgcctgcaatcatttttaagatcattttcccagcatcttcacctagttgacgtttggggtgattagctgtagtgaggctgggggagataatttgcgccatttcatagttatcaaaacctattactgaaatatcagttggcacttgttttccatgtttttgaagatgactaataactcttgtggcaaggcggtcattatagcaggcaatcgccgtaatatcattattactattaagcatcatgtcgacttttttgataatatcttcatagtcttcgcttgattggtacataataacatttgatttagtagtggggatattgttatcttgataggctttgatcattccagtcatgcggtcaacgccttgctgatcatctatttggaatactcctaaaatattagtatgtccgaggctaaagaggtattttaccaaattctcctctgcttcccggtcttttgtcagtaaagaaggaaaatcaaagccaggataagtagagtgaaataggattgttggaattttatatttctggacttgccgataaaggtctaagttaggattaggcatggcgctttcagtcggctcaataattaatccagcaatttgaagatccaacatatttaagattgtttggcgttcacgtttatggtcattaagcgtatttccaacaatcattgagtaaccttgttctgttaccacactatcaattccggaaatgattggagggaagatatagtcagccatatgagtgctgattacccaatgattttatttttttcgctttttgtccaatcgcgttgccagtcttgaacaaacatcccaccaccttgaatacggtaaatatagtgctcgttttcaaggtccccaacagcgcgacgaattgtataacgggacacattaaaacgtttcattaaggcactttcagttggcagtttttcattgattttatattttccatcaataatttcgtttcgtaaagtttgctttactgtttcatatttcacttccaatgctttgcgctcctatcttaataaaagtagttttgaatatataaaaaatgctccatataattagcaacctgctaacgcctatgaagcatttgattgattttatcttgatatttagaaccgacgcttctttggattttcgattggcttgttatccaaatcggtccgtactactagaacatcgcaaatggctgttctagtaacaaattcggtaacagaaccgatcaaaattcgttcaacagcgtttagcccagtagcaccaatcatgatgaggtcagcacccatttcctttggcatatcccgagcaataattgtctttggagcaccatattcaatggagtaactagcgttttcaacaccgtgctctttagcatagtcgatgtacttgtctaaagtcttctttgcagtttctgtaacttgttcaaccattgaagtatcgaaactagaaatattttggaatgcacgtgtgtcaacaacgtgaagtaaacgtaattcagtgtctgcaccattacgttttgctacagcaacagctttcttaaaagccaattcagcttctttagaaccgtcaacaggaactaaaatgtgtttgtattcttgtgccataattgtagtgccctcctgaaatctttatattatatacttattatacactttttcactattgagcgtaaagcgcctacgaaacattacttgcgatgatttatgcgaaaatcagcagtaattgcgaaagacattaacgtttcgctgacacagccaatgattaccataataactagaaatccagtattgtttgtccatccagaaatgatacttagaataccgacgacggtcatcacaatcccccaattttttaattgtggagctaaatatttgcttttagtaggatcgaaaataagaaatggcttatggatgtgggttaagagaaagactccttcaaaaagagcaattaaaccaaatagagtcattagaagtggtaacaacataaaaatctatcctatctataatgaaattaaaatgagggtgagaaaaagcaaaaatctttctcaccctcactaaatatgtacgaaaactccgttggtgccgttaattgtcattcagtgttgacctgtgtttaagacaggtgggacacggctgcctaatattcaactaccaagtgtaaaggcatgttgtccaaaaggcaatgcactagtcccaaagtaataagactgtaaggcaaacctgcgtttagacaacgcgtacactacagaattttcacttttataatagcatttttaagtggttgatgcaattatttgctcgggtgatatttacctcgtaaagtatgttgctgggccttccgtaattgccaatattgccggcctaaactggcttcaaaacgaccattattttttggctggtaatattgagcatctttgattcggtcaggtaagtattgttgagctacccaatcttggggatagtcatgagggtaatcataatctagtccatggcctaacttagcagctcctttatagtgggcatctttaaggtgagctggaacgtcaccaaagccaccttgccgaacctgagcaagagcttcgtcaattgcattaattcccgaattggattttggtgacaggcataattcgatgacagcatctgctaagggaattcgtgcctccggaaagccaactcgttctgccgtttgaactgccgtaacagctcgttgtacagcaggcatattggcgagcccgatatcttcgtaggctgtgatcattaaacgtcgtgcaataataggcaggtcaccggcttcaattaaacgtgcaagatagtggagggctgcatcagtatctgacccgcgaatagacttttgaaaggctgagatgacatcataatgagcatcgccatctttgtcagcggataacgcctttttctggacgctttcctcaataatcggtagcgtaagatgtattttcccatcttcacttggatcagttgatttggccgcaagttctaacccatttaatgcacttcgaagatcaccattggtcgctgctactagttggtcctcggcgttttcttcaaggactaatggtagattacccagaccgcgttctttatcaactaatgcacgctggatagcggtcttcatttcatcagttgaaagtgagtaaactgggaaaatttgcgtccgactgcgaatggcgggattaatactaatatatggattttctgttgtcgccccgatgaggataattcgtccgttttcgaggtgcggaagaagaaaatcttgttttactttatctaatcgatggatttcgtcgagtagtaagattacagttccgctcatcttagcttcttctgcgacgatttgtaaatccttttttgtatcagttgccgcatttagttttcgaaaagcatatttagttgaaccagcaatcgcactggcaatgctggtcttaccagttccgggagggccgtatagaatcattgaagaaagcatttttgctttaaccatgcgtgagatgattttacctggtccgacaaggtgttgttgaccgaccacttcatctaacgttcgcggccgcattcgataagcaagtggttgttgcatatattagccacgatcctttctatggaagagatggtggaaaaaactttgatgttgatcattgtttttttcagtcatactactatttgaatttaccagattaggatatcgttttttgacgtcgactggtgattggtaaacagctgtttttgccgccacgacaactgctaatgagcctgggtcagttttatattctggatcagttttcaatgtaaattgagcattatctttagcagcagtttgaatgtatggatgaatttcgtcgtgagggagattaccgttgataaaaacaaggttgccaattccacgatctaactcggcagttaatgcctttgtccaatcttgttcctgtagttcttgaacactaattgttagacagacgcgttcacggaatgttccgagatattttcgctgttcatcgggcttgatttttggtgtaccgtaaacagcattgtcaattcgctgttgagcagcacttttttcttgttcagacatattgaacgcctccttatcatgcaattgtaacacgaaatgcagaaaactatatttcttgataatgttataatttttgttatatcatgactatgaagaaacaaaagtaggctaacatataagggaagtgattattatgtttagtgcagtattttgggttttagcattttggtttattgtcaatctagtctggacaattgcgcgccttaataatcggatgatgtcaagaacgtttgcctggataaatgtagtggcagtagtaattggtttttggacgttttacgctgccagcaatggcgggggcggaattgctccttggtttcggttgatgaattggactaacattgtccttgcgatttttcaattttataatggataccgcccacatcaatatagtaaaaaatcaggtggattatagaatgaagttagccacccagttggtggtaaataaaaaacgccattcggcgtgacatcaggtatcatattaagtgaaccaaacctatatgaaaggatgtccgtcaaatgacgcacttaaatgataccatgtctactagtttattaactactcataaaaagaatgctcatcttactaaagaagaacgtgtgatgattgcgactttaaagtcgcaaggactttccaatcgcgcaattggtcgccaattaggagttaatcatcaaacaattaataacgagctcaaccgtggtacggtccgccaacttcgtcgtcaaaaatctaatggtaagatttacgaatattcttactacatctatagttatgaagctggtcaggccacatatcttgaacatcaccgccattctggtcgtcgtcgcttatattattcttcaaagcaatttttacgattagctgatcagctaatgcttggtgagtttgacgaccaccattactccccacaagcggttatttataaggctcgagatttaatgaatgatggcaccctgatcccaaagtcggttgtaactttatatcaatggattaatgagggtgtgcttcgtacgtccaatttagacctctttgaaaaacctaaacgtaagcatcatcgaactcatccgcaagctaaaaggtgcttagggcctaatattgctcaacgacctcaaactgcggaccaacggtccgaaattggccattgggaactagatacagttcagggacagaaaaatgacagtgttgtactagtaatgactgatcgcctttcacgagttaatatcacgagtaaaattgctggtaaaactgcgcatgcagtaaatcagttctttataaatttacgccagaaaatgggcacagatgcttactatcgcatctttaagacaataacctctgacaacggttcagaatttagtgagttaacacaagttcacgatcatgttttctatgctgatccgtattccccttgggaacgtggatccatgagatcaataaccggtttctccgcaaggagattaccaaaggtgaagctataaataactatagtagtgctcagatcatagcgactaatgattggatgaatcactatccacgagctatgtttaatggacattcgtcaatggatatctatcgtaaggccttctaccaagagatatcacagctccatcaaccaataatcaattggtcagtattatttatttgagtccagtggctaacttattcttgaaatttagaatagtaaaaaatcatagctctaattaaaaagcttataaaaaggcgaggctgagagaaaacttttgttttctctcagcctcaactgcttttatgaacaatagtaagataacgtggaaaataaccacaaggctcgagtctaagtacgaacgataatcagcctgtgccgtgctaatcatcgtcctagcttagccaaccgccttgtcgaggaggttattttccactcgcctttggtgttttattttacaatttcacaaaattcgattgtttcactgttaggaccttcaatgttgaagaacttaattcccttatcccagaagtcaaggtgttgaacttcatcgtcctttaggttgaaaccttcagccttagcagccttgaaagccgcgtcagcatcactagtattaagggaaatgtggttaatagcacccgtttcgtgaacggcaccgtcgccagtccagatttctaaagtgaggtgaccatattgcatgaaaacaacttcatttccttggtcatcagtatcaaattcgccaagtttcttgaaaccaagcttttcccaaaaagcaattgtttttgccatatcatcggttggaatcccaatgtgttgtacatcgtcaaagtaacctgctaaactcttgttaaatgccataataaatcactcctgtataaattttaattaccaatatcaagtgcctggtgctttaatttagggaagatatgacggtctgaccaaccagtaattgcaccttggaaggcaagggcaaataaagttcctaatccaaagttgtaaatactgccttgcatgaatgcagcgataattgccataattgttggtggaatgtatgataaccacatcgcaatcgttgcgttaccatggcaataacggaaacgaataatttggaaaaggtcatcagcggggtgtaacacgaggttgacacgctgataaattgaaatggcggttccgatgaaagcaacccctaagaagttaatgaaaacatataggataatcatcggtaaggtagtggcgtccggcataattcggttaaagatgtcagagaaccactggataaaaatagaaaatggcaacatgaaaataaaattaccaccaattcgtcgccagtcccacttatgcatcaaaattgcgttgaggatagaagttaacatccctaagaccatgaaagcccagaaaagggtcattgaattgttccctaaaacggcaatccctaggttgttttctgcggctgtccaataagcggagccaagaaattgtgggtggacgtgtgaacttgtaacaagtgttaggacgttccccattgagttaataacaattgacagtgcaaagtatgcccaactagcagttaatgaaattgttcgctcggcaacttgaccttgtactggaactttttcttgttccatttatattctcccttccaacttgaccaatcatttggtgaagttattcactttctctctacgatgaattaatttacaaccatcaaaaaatcttgtcaagcgcttcacaagttgaaatgacgggatttatcctataccaaaattattgaaacgatttactgaaagcgcaatcatcaagtgggtgtaggaaacataaatctaattagaccaattagctgaaaaagcttacaaaaaaattttgaaaggatgagatatgtgaaaataatcatttctccagcacgaacaatgcaagttgataccgactccttactttacaaagatttgccggaatttcttcagcagacaaaagacattttagggtggatgaggagcttatcttatgatgagttacacaaagtatggggaaattgcagctcgcgtttagcgatgaaaaattatcaatggctccaacaaatggatcttcaacgaaagctgacgccagcaattattgcttttactggtctgcaatatcaatatatggcgccaagtgttttctcagatgatgggttgaaatacgttcaagacaatttacggatattatcaggattttatggtattttacggccgtttgatggaataataccttaccgcttagggatgggtgacatggcgccagtgaatggatataataatctttatgacttttggggagaacaactttatcatgaactctataagaataatgatttagtaattagcttagcttcggtcgaatacgaaaaggcaattactccttatctacaaactcaagatcgatttatcaaatgtatttttggcgaagaaatagatggaaagataaaacaaaaagcaacattagctaaaatggctcgtgggaatatggtgcgatatttagcagaaaaccaaattcaaacaattgaaggcgtcaagcagttttatatcggcggttaccattttcgggaagatctgtctactgatgaaaaattagttttcgaactggtaaagtaaaagtaatcatattatttgccaatctttttgaattgtcttataaaagaattgtatacaaaactattaacagtgcactgattctattaaatttttaatgatagaagggagtcaaattatggtaggcgattctttaaataagacaggtgccaatttattaatcaaggccttgcaagagaataatattaaccggatgtatggaatagttggaatcccggtaaccgatttagcgcggctcgctgaattacgcggaatgaaatattatggttttcgccgtgaagattcagcagttaatgtcgccgcggcaactggttacttaacgtaaaaaactggcgttgcattaactgtttcagcacccggttttttgaatggattaacagctttagctcaagctactaagaattgttttccgttgattatgatttcaggttcgtctgaacgccatattattgacttatcacagggcgattatgaaggtcttgaccaatataatgcggcaaaacccttctgcaaaaaagcttatcgggttgatcgagcagaagatatgggattagctgttgcaagagcaattcggacagcagtttcaggccgccccggtggtgtttatcttgatattccagctgacacaattgttcaagaagatactgctgatcaatctaattttggggtttataagttagttgatcctgcccctaaacaggtacctaatgatgaagcaatatcacgagcggttgatttaatcaagaatgccaaaaagccctttattattttaggaaaaggagctgcctatgatcagaccgaaaaacaagtgcaacaattagtagctgaaacgaatattccatttttgccaatgtcgatggcaaaaaggttaattccagatgatagtcctcattctgctgcagcggctcgttctctttcactacgaaatgccgatgtagtaattgtaattggtgcccgtttaaactggatgctttcatatggggatgccccacaatttaacccgcatgcaaaatttgttcagctagacatcgatgccacgcagtttgatttctcacagccaattagcgtcccgctccaaggagatcttaagtcgattttaggtaaattggttccggcgctattggcaactggatatcaagcgcccgcagcatggttagagcaaattgcgcaagatactgagaaaaatgacaaaaagtttgcgcaacgaattgctaatggtaaagtagcacaaaaatttggctattatggagcgattgcgcctattgctgaatacttccaacaacacccagacacctatctagtcagtgagggggctaatacgcttgacattggacgcgatatgattggaatgcagctcccccgtcatcggctcgatacgggaacttggggcgtcatgggtgttggccttggttatgcaattgctgcggtggttgaaacaggaaaacatgttgttgcgcttgatggcgatagtgcatttggttttgatgggatggagattgaaacgatttgttgatataagttgccgattacggtcgttattatcaataatggctgaatttataacgggatcggccaagttgttcccaatcaacttgggccaactactcttgatccaactgcaaggtatgatttaatggctaaggcctttggtggcgataattattttgtaagtaattacgatgagatgaaaaatgtctttgcaagagctgttgactcggaacgcccaaatattattaatgttcaaattgcaccatcgatgggaaaagaatctggccttattgggaatctaaatccaaagcttaatttacaaccacttgaagaaaatgagaggagccatcataatgactgaacaaagtgaaaatgcaccattaaaaggaattaaaattgtggactggacacgggttcaatcggggccttcctgtacttagcttttagcatggctaggagcggaagtgattaaaattgaacggactaataccggagacccaactcgtaatgagctgcttgatattaaagattcatggagcctttattatttacaacgccgtttgtaaaattaagttagaaaaatagaaaagccatttgtggtagacttttgaatacccctaaacaaaagaaaggaaaccacaaatgacttacacccatcttaccacaaacgagctgacaatcatcgcccattctttcgtgcaaaagcttaaagcgtaccgagtggcccaaatgatcaaccgttgtgccgaaaccgtttatcgcgtttatcgttacctggaaaccggtgcctcaattgctgattatcaagatcactatatgcgcaataagcaacgttgtggccgaaaacgtactcagttgtcactggctgaactcacttatatcaacgacaaaattacccaggggtggacgcctgataccattattgggcgcgctgagcgcccaattagttgtaaccagcgaactctttaccggatgtttgaacgtggccagttcggcttcgatgtccgttccttgccgatgcgaggtaagcggcacccgaatggctatgtcgagcgccgcgggaaggctggccaattggggagaagtattcacgagcgtgccaaggactttccgcactatgccacttaatttgggcaccttgaagctgataccgtccaaggcaaaaagcagcaaggggcggtaatgaccctgaccgaacgccaatcgaaggtcgaaattgtactcaatgtgcacgaaaagacggctgatgcgattaacaaacacttaagtcagtggtttcggaaattcccgcggcacttctttaaatcgattacctttgacaacggaaaagaattcgccggctggcgcgagattgccaatcaatttgaccttcacacttactttgtcgaggttggtgctcccaatcaacgagggctaaacgaaaacaacaacggtcttttatgccgggatggcttaacgaaacagctagatttccgcaatcttcctgatgaattggtaacccaactgatgagtaagcgaaataacctgccccgcaaatcactaggctatcgaactccatatgaagtattcatgtcttacatcactgatgagcaactattttctttctaacttaaattgacatttcgggtaaataaaaaggcattcccaaagaaattgggaatgcctttttgggttgaatcaaacaagtgatagctattgattacttgttgtagaattcaacgataagagcttcatcaatatcagcgttcatatcttcacgtgctggaatgcggttaagcttaccttcaagcttgtcggcatcaaagtcaacgtatgaaggacgagaaacaacagcttccacagcgttcttgatgatgtctaagttcttagacttgtcacgaacggcgatgatttgaccaaccttaacttcgtatgatggaatatcaacacgcttaccatcaacagtgatgtgaccgtggttaactaattgacgagcttgacgacgagtagtggctaaaccaagacggtaaaccatgttatcaagacgacgttcaagcaatgccataaagttggcaccgtgagtaccttccttaatcttaccggcacgaacgaaaaggtttgagaattgacgttcagtcataccgtacataaaacgtagcttttgcttttcacgtaattgtgtaccatattctgaaagcttaccgcgacgatcacgaccgtggtcaccaggagcgtaagcccgacgtgctaattctttaccagtacctgaaagtgaaacgccaagacgacgtgaaacacgccaacttggaccagtgtaacgagacataaataaattcctccaataattttagttggagtaaaataatccgattgtgagcttggcattcgtgcaggctgatttgaatctttcaccctagcagccgggttactaaaaacaccgttaggcaccagtctgttgacgagcttgcccctcactgctgcattattttacacaaagtctagtatacaacggttcgtaataataagtcaatcttttctttagaaacctcgtaacttttttagcagaatgatgaacaatataaaagtttattaaacgaagatgttttttcatatcttttaaagcacgttcattgtggtatgctataattttgaataggattatacggataattattgtgcaagagcaataaacaataaaaagtagtaggtggaaaaagtggtttttcaagtattgattggtattttaattattgttgtagcaatattagcttgcgtatatttttatcaacgacgagctgttaaacagatcaacgacttaatggaaagcgagaaaaagctagcagatcaaaaagttgaccagcagatcaaaaatgttgaagaattgcaactaatcggggatgctaaaaagcaatttgaaacaattaaaaacaagtatgaaaaacaagtgcgaccagcgatcacagcctttaataaacgagctccccaattattagcagattcacggacgagcaagttgctgacaattaacactcagattcgagacctgcaagcagatttggcaaagttaacaacaactctccaacagatccaaaagacttacaacatcttcgtcaacaacaacatacccataagcaagcggtcgagcagattaaaaataaatatcgtcaattccaccggcaactaaatgagaagagcttcgaatatggagacagtgaaaagcagttaaatagcagattaaacgaattagaggatcaattcgctcaatttactgatttaactaataagggcgatattgaagcggctcaagagattttaaccaatttgcaatctgaaaacgataaatttgaacaagaccttaagaagattcctcagctctataagccaattgcaaccgagtttccagaacaattatccgagctaaaaagtggttataagacacttgtaaaacaaaatttccactttacggagaaaaatattgataagcaaattgaacagctccaatccaaactggatcagacgattgaccaacttaacaatttacaattagatgttgtggaacaatctaataaagatcttagtgaccagattgattacttatacggggtaatgcaaaaggaaattgatgctaagaatgaagctgttcatttgattgaagtgatgaaaggctttacaaaacacgctcaacggcaaaatgacgaacttggtgtagaattagaccggttaagtttgaattacacacttactaatcatgaacaagaaaccgtacgtgaacttggtgaacaaattaaagcaattattaagcagtaccgtgatgacgcagaagcaattgctaacaaaacagctgtttatagtcaggttcttgatcggcaaaaatctaatcaaaagaacttaactgaaattgaaaaaagtcaagaaaagcttaacgatgaagttgctaaattgcaaactgatgaacaacgtgcccgtcaaatgctgcaaaaatattccacccagattcgtacaattcatcggcaagtagaacagttgaaccttcctggcttaccaaaagattacttagattacttctttggtgtcagcgatgagattaaaaagttagctgatgaattgaatgagtataagatcaatatggatgaaattacgaagcaactaattatcgttgagtcagacctagacacattaaatgacaagactgatattcttcgtgatagtgcggaattaacagaacgattccaacaatatgcaaatcggtttagtgataacgaaaagattgcagcagcagctaaaaaatcccaagaactttttaagcagtttaactacacggcaagcttagaagcaattgcgaccgttttagaagaaatagaacctggtagctacaaacgaattgaagatacctattatcgtgaaattggtaaaaattaaaaatcaaggtgagtgggaattagcctaccgccttgtggttacgacgcgaagctagttccacgatatcttaaacaatgttcctataaataaagaggctgttgaaaaaatgaagttttttccagcttcctttttttcttattaaatgatagtgataattaatgcctaatagctaattttctgttataatataaaaccgttttaagaagagtcgaaatcttcagcagtagcctatcctatactgttgaaatcataatcagagtaggttacccatttgtaacaaccctgtgtattatttttaggaaggaaattagtatgatctattttgataatagtgcgacgacaaagatactaccggatgttttgtcgacatacgaaaccgtgagccaaaagatttgggggaatccaagcagcttacataattttggtgaaaatgcttggaaccttcaagaacaggcacgccagcagatcgcaaagttattcggggttaagcctagtgagattatttttactagtggtggttctgaaggagataactgggtaatcaaaggaactgcaatggctaagcaccgttttggcaaacacattattacgactagtgttgaacatgcagcggtaaaaaatgcattggagcaactaaaagacttcggatttgaggttacctatctcccggttgataaagagggacggatcaatcccgctgatgttaaagccgctattcgtccagatactattttagtgtctatcatggcagttaataatgaaattggaacgattcagccaattaaagaagtgggagaaatccttaaagattatccaaacattcactttatggtggatgctgttcaggcaattggtaaaggattagatgaccaagtatttagtgatcgtgttgattttgccactttttctggtcataaatttcatgctccacgaggaaccggttttgtttacgtcaagagtgggcgcaagttagagcctttgattgctggtggtggtcaagagcggacactacgaaatggaacagaaaatacacctggtaatgttgcaatggcaaaagcaattcggttagtaaaggaaaatgaagcggaatcagtaaaacgtgaacaagcaattaaagaacggatttacgaccatttaagtaaatttgatcatgtaaaattgatttctggccgcgatcaaggtttcgcttcccatgtactgtgctttgcaattgtaggagttcggggtgaaacgattgttcatgcctttgaagacaaggatatctatatctcaactactagtgcttgctcgtctaagaagcattccgaagccggaacattagctgccatgaaggttccagaagatattgcaacaagtgcagttcggattagccttggggatcaaaatacccttgaagaagctgatcagtttaataaaacatttgatgaattatacgctggctttaagaaaattattgaataaaatctgaaaggaggacataacgtgcaatatacagaaattatggttcgttatggtgagctttcgacaaagggacataataaaaagtcctttattgatcgtttaggggtaaacgtacgaaaggcccttcatagctttgaccaggtaaaggtgcatgcacaacgtgatcggttgcatgttgaattaaatggagttgactatgatcaagtgatgaatcgcttgaagttagtgtttgggattcaaaacttctcgccatcaattaaagttgataagacttttgaagcgactgcagaggcagcagcgcagatgatcgctgaacaagttgacaagccaattacctttaaagtggaaactcgtcgatcagatcaccaatttgcaattgatacctttgaaatgaacaacaagctaggaggatacctcttagataagtttcctgataaattaaaagttgatgttcaccatccagacctaactttacgggttgagatccgtcttaatgggattttcctttcaagtgaaacgattaagggtgctggtggtttgccagttggtactgctggtaaaggaatgatgatgatgtctggtggaattgattcaccagtagctgcttaccttgggatgaagcgtggcgtttcaatggaaatggttcacttctttagtccgccatatactagtccccaagctttagcaaaggccaagcaattaactgaacgtcttgcaaaatatagtggaagtattaagtttattcaggtgccatttgccgaaattcaagaaacagtaaaggaaaaagttcctgaaggttacttaatgacaattcaacggcgaatgatgcttcggttggcagctgccttaatgattaagcgtcatggtctggctatttttaatggtgaatcattagggcaagttgcttctcagacaatggaaagtatgctggcgattaatgatgtaacttcttatccggtattgcgaccagtattgtcatttgataagaccgaaattattaaaattgcccaagatattgatacctatgatctttcaattcttccatatgaggactgttgtactgtctttacaccgccatcgccaaaaacccggccaaacgttgagcgagctcgtgaatacgaaaaacgacttgatattgaagggttaatgcaacgagctcttgatgggattgaaattacggaaattcatcctggtgaagattatttaaaccaaaatgaagatgtttttgctgaattactttaattaggccttgacgaggtttgataatttagctatgatacattttaataagcattgaccgaaagagtagtaaagcggcacctaaaaagcgagatcctgagagtgagagaggattagttaaactttatgaaggtagttcgggagctgatatactgaaattaatagtaggtatgtccggttcatttaccgttatgaaatgataaagtggagtattttatactcaaattaggtggtaccgcgatgattcgtcctatcgattgtgatagggcgttttttagttaatgcacaaaataaaaatgaagattgcgttctgaaaggagtttctgccatgacagaaaaagatatgtcaaccaagtacgatccagcggcggttgaagaaggccgttatcaatggtggattgatcaaggattctttaaaccaagtggtgacaaaaaagctcacccatattcaattgttattccaccaccgaatgttactggtaagttgcacttaggtcacgcttgggatacaactttacaagatatgatcattcgacaaaagcggatgcaaggctatgatgtattatgggttcctggaatggaccatgctggtattgctacccaagcgaaagttgaagcccggcttcgtaaacaaggaatttctcgttatgaccttggtcgtgacaagtttgttcaacaagtttgggactggaaagatgaatatgctgatattattcaccagcagtgggctaagatgggtatttctgtggattatgaccacgaacgttttacccttgatgaaggattaaataaggctgttcgaaaagtctttgttgatctctacaataagggcttaatttatcgtggaacttacatcatcaactgggacccacaagcacggacggccttatcagatattgaagttattcataaggatgataagggtgcattctaccacgttaagtatccatttactgatggaactacttttaacggtaaggattacatcgaaatagccactactcgtccagaaacaatgttcggggatgaagcggttgccgttaaccctaatgatgaacggtacaaggacttagttggtaagaaggtcatggtaccacttgtcaaccgagaaattgagattattgctgacgactacgtaacacctgaatttggtactgggatggttaagattaccccagctcatgatccaaacgactttaaggtaggtaagcgtcacaatcttcctgaactgaatacaatgaatgaagatgcctccatgaacgaaaatgctggtaaatacgaaggcatggaccgttttgaagctcgtgaagcaatcgttaaggaccttcaagatcaaggttatatgttaaaagttgacccaattgttcactctgttggtcactcagaacgaacaggggtacaagttgaagcccgtctttccacacaatggtttgttaagatgaagccattagccgaagcagctcttaagaaccaagatactgatgaccgagttaatttcgttccagaacgattcgaacacacctttacgcaatggatggaaaatattcatgattgggttatttctcgtcaattatggtggggtcaccggattccagcttggtataacaaacagactggcgaagtttatgttggtatggaagctcctaaagatgccgaaaattgggaacaagataaggatgtccttgatacatggttctctagtgcgctttggccattctcgacgatgggctggcctaatactgattcagcagacttcaagcgctacttcccaaccaatactttagttactggttatgacatcatcttcttctgggtttcccggatgattttccaatcgcttgaatttacgggtcaggcaccatttaagaatgttcttctccatggtttgattcgtgacgaacaagggcgaaagatgagtaaatccttaggaaatggtattgatccaatggatgttatcaagaagtacggggtagatgccttacggtggttcttaattactggttcaactcctggtcaagatattcgttttagctacactaagatggatgcagcttggaactttattaataagatttggaacgctagtcgttacgttatcatgaaccttggtgagatgcctgctcctgtccttcctgataagagtaagtgggatttagctgatcggtggattttgagtcggttaaatgcaactgtaaagcaggttaacgaacagtttgacaagtttgaatttggtgaagctgggcgggcactttacaacttcatctggaatgatttctgtgactggtatatcgaaatgaccaaggagaaactcaataatgggactgacgaagaaaagaatgatactaagaatattcttggttacgttcttgatcagaccttgaagatgttacatccaatcatgccattcgttaccgaaaaattatggcaatcaatgccgcatgatggtgaatcaattatggttgcagattacccagttgctaatgccgaacttgatgatccagccgcaactgaacaaatgaatagtttgattgaattgattaaggctgttcgtaacattcgaaatgaagctaatgcgccaatgtctaaaccagttgacattttggtaaaagttgatagtgatcacttggcacagatgttgaatgataaccgggattacattgaacgcttctgtcatccagagaacttaactattggtaaggatgttgaagctcctaagcttgcgatgagcggtattttgactggagcagaagtttacatcccaatggctgaattagttgaccttgatgaagaacgagatcggatggaaaaagagattgctaaacttgaaaaagaagtagaacgttcacaaaagaagcttggcaatgaaaagtttgttaataatgcgccggaaaaagttgttgaagctgaacgacaaaaggcaacggaatggcaacaaaaattagcagctgctaaagaacgccttcaatcacttcaacaagcttagcgtcaatttatagtaggataattaacatttttaataataaatgaaaattatatcattttattaaataggttagactactgtgagaatgctattagctttaatatttataaatatagtttaaaattagattaaaaaggaattggcaattgctgattccttttttgattaatatgaaaaaataatcatgcatcgttcgaaaatgtttatctactgataaggattaaataattgataattaagcggtttatttagagattatttcacatatttaccatttatttattgtaattatttatcacaagtattatgattgattgtggagaaacaggaaacggtttcaactattctttttatcgatatacttcggagggaggtatttataatgactattcttagtctggcacgtttccaatttgccatgacgacggtttaccacttcttctttgttccgttttcgattggaacagcttttatcgtcgccattatggaaagtatgtacgtctcaactaaagacgaaacatacaaaaaaatggcaaaattttggggaaatattttcttacttagttttgcggtcggtgttgttacaggtttgattcaggaattccaatttgggatgaactggtcggattactcacggtttatgggtgatatctttggtgctccattagccctcgaagctttgctatcattctttattgaatcaacatttattggcttatgggtatttacctggaaaaaggttaagccagggttgcaccttttcttcatttggatgacaagttttggctctttaacatctgctttatggattttaactgccaactcattcatgcaacacccagttggttatgaaatcaagggtggccgtgcagtaatggttaattttggtgcattgcttaaaaacccccaattatggtatgaatttggacatgttatccttaacgccatcatgatgggtggtattattattgctggtttaacagcattccaacttctcaagaaccaaaaactttctgaagctaataagaagttttacaagaagtcaatgcgtttaggacttttagtatcattgattttctctattggtggaattgcgttaggggatgcccagatgcaatacttaatcaaagaacaaccaatgaagtttgcagctactgaagacgtattcacgactactggtaagcatgcaccgtggacaattgttggtattgctgatatgaaagaccatgaagtaaaaggcaatatcgatattccctatgccctaagtattttgtcataccacaaaactactggtgcggttaccgggatgaatgagctcaatgcccaatataagaaaaagtacggcaagaatcttgattactacccaccagtaaatacgctgttctatagtttccggattatgtgtgcagtcggtgcttggattttcttagtttcattagttggattaattatgacaagagaaaagagcaagaaaccacttgcacaacgccgctgggcactttggtgtattgcaattaccactttcttaccatttatcggtaatactgctggttggtttgtaacggaatttggtcgtattccatggacggtttatggcttgtttacaattgctgaaagtgtatcaccaaatgtttcagttggatcattgttaacatcaaatattgtttacttcgtattatttacaactcttgcaattacattaatttggttaattgttcttgagttacgtaaagatccatcggaagcaattgaacctaaattcaagaaggttcttgacccatttgacaaggaggcgttctagatgagttttcttcaattattatggtttgtattgattggagtgctttttgctggcttcttcttcctagatggatttgattatggggtaggaatggcggtcgaaacacttgctcataacgaatcagagcgtgatcaacttgtgcggacaattggaccagtttgggatgcaaatgaagtatggttaatcacggctggtggtgcaatgtttgcatcttttccatattggtatgctagtcttttcagtgggtattacttaatcttaatgattatcctagctggtttaattatccgtggtgtttcttttgaattccgtaaaaatagtccaatgtcacaaaagcggatctgggattgggcattagcaattggtagtgcaatcgttccatttttccttggtattatgtttgttagcatgattcatggaatgccaattgatgctaacggcaattttcacgcaggattctttgactatttcaactggctttcagttgttggtgggattgccttattgcttttaacctacttacatggaattaattatattgccttaaagacgactggtccggttcaggaacgcgcccggaactacgctgaatttttgtactggattctttatgctggcgaagttgtctttgcactattattaatctttatgaccgactttatggctgttcacccagttggcacaatcattatgcttatattgattgttggtttctcagttttagcccaagtagaaacctttgctggtcatgaactaattgcctttatttcaagtgggttaaccttagtatctttagttgtattgatttttatcggtctcttcccacgggtactaattagtagcattagtccgaagtacagcattcttattcaaaatgcttcctcaacagaatatacgttgacagtgatgacgattgctacttgctgtcttttaccatttgttttggcatatacaatctgggcttactggattttccgtaaacggattgcaatgccagctattccggaggttaaataaaaagttatgattgatcgactactcttcaaaatcgagggagcagacatatcatgattaagcttgtggggctttatgtcctgcaagcttttcttatccttggtcagggattaagtttggctgctttactaacaggcttatggcagggacattctcttttaagtcaaatatatggcttaggtggatttattgtttgctaccttttgcgtcatgggctaaccgaaattgggaatgattggcttgataagtattcggctaatgctgcccaaaactttcgtcagcaattattaaaaaaagtctttgcgcttggaccggtaattgttcagcgggagggaaccggtaatatggttactctcgctcttgatggcattaaagaagttgaaaattatattcgactcatctatagcaaggtgatcagcatgatgattattccagtcattattttggttgtctgtttttggctcgattggatttctggcattgttatgttgttagtttatcctttgattgttttattcatgattattttaggctatgcagcgaaggctaaggcagatcgacagtttgcagcttttcaaatattgtctaatcactttattgattctttgcgggggattgacacattgaagtactttggccttagtaagaagtattcgcaaagtatttatcggtcaagtgagcgttttcgcaagtcaacaatgagtgtgattaaagtagcgatgttatcaacgtttgctcttgatttcttcactacattagctattgcaatcttagcagtctttcttggcttacggttaattaacggtcacttattgctattcccgacactagcaatcttgattttggcaccggagtattttttgccgattaggaactttgcaagtgattaccatgcgacgttgaatggtaaaaattcatttcatgcggttcggcgaattcttgagatgccattaccaaagaagccgactgttgaattacaccagtggacaggagtcgatgggttaagttttgagaatgttgagtttatgtatcctcaaaatggcagtgaattaacaaaccttgatttaactgttaaggggaatcaaaaaattggcattattgggatgagtggggccggaaagacaactttaattaatcttttaagtggctttttagcgccgacaagtggccaaattaccattcaaggaaaaaaagtaacgactttggatattcatgactggcaaaaacagattctctacattccacagactccctatatttttgcagatacgttaaaaaataatattgccttttatactccaaatgtcagtgaagacaaaataaaagaagcgattcatgttgtcggcttagatgatcttgttgctgaattacctcaaggattagggacgatgattggcagcggccaccgagcattaagcggtggacaggcacagcgaattgccttagcacgagcatttcttgatccagaacgtcgggtaatgatttttgatgagccgaccgcccaccttgatattgagactgaactagagttgaaaaaaagaatgcttccgttgatggaaaataggttagtcttttttgctacccaccgtttgcattggatgaagcagatggactacattttagtgttgaagaatggcaagttaattgaacaaggaacgtatcagcagttgcttgatgaacatggttactttacagaactgatggaccaaacacgcggaaaggagataacccatgaataagattcctttacttaaagcaatgaaacatgatcggtgggtgaaacccttcctaaagcgttacaagtggaccttggtattagcaattaccctggggattgttacctttatttgtgctagtggattgatgttcaccgcgggctatttaatcagtaagtccgcaacgatgccttttaatattttgttagtatatgttcccatcgttcttactcgtgcctttgggatttttagaccggtgactaattattttgaacgattggttagtcataattgggtttttaaaatgacttctgcatttcgtaaaaagctttatgattcgttagagcaggatgccgttttctttaatagtaagtatcgaattggagatattcttgggttactttcagaagatgttgcccacattcaaaatttatatttacgaacgatttttccaatgttggttgcatttgggctttatgccattatcgttattggaatggggataatttctccactaatgggtcttttaatgttaattctatttgggttaatcatcattgctgttcccgtgtggtcagtgcttgttaatggtgcacgccagcaactagaaaagcaatataccaataccttgtatgctgatcttactgataatatcatggggattacagactgggtatttgcggggcgcagtgcggattacctgcagcactataataaaagtgagaaaaacgtactagcatctcaaaaagcgatgaaacgttttgagcattggcgtgattttattcttcaggtaatgattttattggtggttgttagccttattgtatggggagcagcacatttcggcggtcattggggaggcagtgcaaattggattgcggcctttgttctttgtgtctttccccttgatgaagtattgtctagcttgccagcagctgctcaagaaactaatgtatatacggattcattaaagcgattgaatgaattaccacaaccgcctgctccttctaaggttaatattgagattgccgctccttatcatcttaaaattacagatgtttattatcgctatcctaaaacagagaagatgatcttgcgggggattaatcttgatgttaatccaggtgaaaaacttgccattcttggtcgcagtggggctggaaagagtacgttagctagtttaattcgtggagaccggaagcctacttcgggcactgttactcttaataatgtgccaacgggtgaatttggtgatgagatttcgaattatattgggatcgttcaccaatcgccatatttgtttcataccacaatcttaaataatattcgtttgggaaatgaagatgcgacagaggatcaagtatgggatgttcttgaacgtgttgggttggccgctatgattagacgactgccaaaaggacttcatacgatggttgatgaggcagggttacggttttctggcggagagcgtcaccggttgtctcttgcccggattttactcaaggatgcgcccattatccttttagatgaaccaactgtaggtttagatccggtaacagaagaaaaggtaattgagacttttatggagcagctacaaggaaaaactttgatttggattactcaccatttacaaggcatagaaatgatggatcaagttgtttttatcgaggatggtaaaatttcaatgcaaggcagcccggcagaattacaaaaaacaaatgaacattaccgggcgttaaaaatggcagatgagggtatctagctagtttaggaatgttataataaagtaggactattaatgaagggatgaatagtaatgaaagaagttgttgtacttggagctggttacgctggcttaaagacggtcgtattattacaaaaaaagctaaaaaataatgttcatattacactagttgatcgtaataattatcattatgaagctactgatttacacgaagctgctgcgggaacgcaaagtgcttcaaggatcacttatccaattagtgatgttattaatccacaaattactacctttatccaagatgaagttgtaaagatcgatcctgataaaaagacagttaaacttgctggtcatgaagagctactgcactatgattattgtgtattaggactcggctttgtttcagaaacctttggaatccctggtgctgaagaaaatgcattaccgatgactaatgttaaagaagctttagcaatttatgaccatatcattgccaaaatgaaagattatcgtaccactcacaatcctgatgatcttcaaattgttatttgtggtggtggatttactggaattgaattagcaggggcgcttgttgacgctcgagcaagttatgccaaaatcgctggagtttcaccagatgaaattaaaattacgctgattgaagcttcaacaagattacttccaatgtttagtgaaaaacttgccgaatatggggtaaaccttgttaagagccttaacgtgcaattgcttgatggttcacgaattagcaagattgaacctgggaaggtcatctacaagcatggagatgatgatgaagagtcccttaatgctggtataattatctggacaactggagtaagtggtaatccattgatggaagaatgtggctttgatgctaagcgtggccgggtaatcgttactgaccacttaacagatcctaagcacgatgatatttacatcattggggatgttgctgccgtaatgccaccggatggtaaacgcccatacccaactactgcacaaatcgctctagcaatggctgattacacggctgaagacattgttagccgtattaagactggcaagcatgaagctaagccatttacttacaagtccttaggaacagttgcttccgttggtaatacgcgggcatttggtgaagcaatgggtcatgaattacgtggatatcctgcttcagcaatgaagaaaattattgctgaccgttccttgttagaaacaggtggtttgaaagagctatttgctaaaggacgctttgacttatatcactagaaaatgaatgaggctgagaaaaaacttttgtttttcaacagcctcgtttttatgcttatatgctaaaaaggtatggttataataaataaagggtgaaataaatgattaaaacttatgatgaagcattatcttttattcatggacgaacacaattcaagaaaattccaacactcacacggatgaaacgattcttggcagaattagggaacccacaagaaggacttaaatacattcacgttacaggaactaatggtaagggatcaaccgttgcaatgatgcggtctgctttactggaaagtggccttactgttggaagttttacatcaccttttattacacgatttaatgaacgaattgagtataatggaatcccaattagtgatgatgatcttttaagattagttcaaaaaattgcccctgttgtcaaaaaacttgatgatacattagaaacaggcggtccaactgaatttgaaattgatacagcattaatgttttgctacatggctgaaaagaagcccgatgttatattgcttgaagtggggattggggggctatacgattctactaatgtaattacgccagttgttagcgtgatcacgacagttggctgggatcatatgaagtatttaggtgatactttagctaagattgcggctcaaaaagcaggaataatcaaaaaaggtgtcccagttgttttaggtgctctcccaacagaagcgcgcgaaactattctcgcagatgcaaaggagaaaaaatccccggtttttgaattaggaaaagactttactgttcacaaacttaatggtcatcagttccacgcaaaaattcggtatcaaggaaaaaatctgaaaaaaatagaaataattcttgggttgccaggcgactatcagatagaaaatgcagcagttgctttgatggctcttgagctttttatggagaagcgtgggctggcaattgatcgtcgtgctttgatagcgggattagaaaatgctgcttggccggggcgattagaagaaataaatactactcctctggtcttactagatggcgctcataatcttcctggtgtccaggccctggttcatactattaagaatgattttgccgatcgggaagtttacctcttggtagcgattttggctgataagcaatatgaattaatgcttggggaattagcaagcttggggaatattcacttaactgttactcactttgctggccccggtccaaaaagaccaagtgcagacttagcaaaagcagttgctgatattccaactaaatatcccatccagattattaacgactggcgattaggaatcgggcaggtggcaagtcaaatgagtgcggacgatgtaatgattattactggttctctttattttgtttcagatgttcgtagattctttttaaattaaaagtgtaaaagcacaaattttccgtatttaaatatatagagtgtaaaaaggagaattatttatttatggaaaatgaagtgattaacgaatatacaaaattagtctggacggctattcctgataaaccgggaacaaagaagcaggaattatgtcaacgtttcttacgtaagtgtcctactcccctagcaattaaacggctttcacgtattgaaaaaaatgagataaatgaatgggcgccagaaatgcttaacttttttgctgctattgaattagggaagatagtaactaaaagtcatgaagaaattattggccatgcttattcgagtatcgaattaggacgcaagatggttgaccattttcaaagtgaagagcaagaaagtgtttgtattgcctgtacagatatccataatgagataattgattggaaaattttgtttgtaggcggcggatgcgaatgtattctttatcctgataagatttttcaatatgcgctccggtgttcagctcaaggaattattatgatccacaatcatccgacgggagacattcatccttctaagcaagatgaatcttttactcgccgcttagaacgaggatgtgagattattggacttcatttagttgactttatgattgttggtcgtgatacataccatagttggcgtgaagctagtctcgttaatgagcttaaaaagtaaagaaacttttaatttattataataattacgctttctttgttcttattaatgtatattaatgttcgtatgtaccgagtggctatggtataatatgcacgatattaatttgattttaagacgaagggaagaagcagattgctaggaattggaacaaaaaatcttggcattgaccttggaactgctaatacaattgtctaccttgaaggtaagggtattgtattaagagaaccatcagttgttgctcgtaattctaagactaacgaagtaatcgctgttggcagtgatgcccgtgatatgatcggacggacgccagaaagcattgtggctatccgaccaatgaaagacggtgttattgctgattacgacacaacggttgcaatgatgaagtattacattgataaagcactaggaaataatggtaagccatatgttatggtatgtgttcctagtgggatcacggaagttgaaaagcgggcagtgattgatgctactcgagttgcaggtgctcgtgatgcttatgttattgaagaaccatttgcagcagccattggagctggattaccggttatggatccaaccggtagtatggttgttgatattggtggcggtactactgatgttgctaccatttcattaggtggtattgtctcaagccggtccattcgaatggcaggagataagatgaatgatgcaattgttcaatatgttcgtcaacatatgaatttattaattggtgaacgaacagctgaaaagcttaagtgggatattgggtctgcatctgttgaagctgctgaagaaatgggaacaacacaagttcgcggtcgtgatcttgtaactggattgccaaagacaatgcaagtatctgcgaaggatgtttcaacggccctccaagatgttgttgatagtattattacggcaattaaaggaacacttgaagaaacttccccagaaattgctgctgatgttattgatcacgggattgtattaactggtgggggcgcattattaaagcatttaccagatgttattgcagatgcaaccaaagtaccagtatttattgctaatgatccccttgactgtgttgctattggtaccggcgagtcattaaagagtattgatgtaatgaagaaaaagtaaaatgattctctgacagtgacgttagcgatgaatcatcattagtactaactaatgattaacggggctgagtgccaagcagaattgtttggcaggccccgtcttaattaccttgtgtatgcattggagggtcataatgcagaaatttttttccaatcgccgattagttattgctgtgataattctagttgtctgttttggactaatggcaggttctgtttctttacggaatagacgaaatacaccaccgattatccaacaatttggaaatgatattgttggctttgttgatagtgcagttgctctccctgtaaattgggcacagacaagtataagttcaataaatgggttgatgaatacttattctgaaaaccgtgaacttaaacagcaagtaactgaattagcacaaactaaagtccgtgatcagaccttagctcatgaaaataaacaattaaaacaacagttaaaacttaataattcaatgaccgactataatacagttacagcggctgtgttaatgcgcacaccatcttcatggcaacgacaactcgtaattaataaaggtcaatctagtggtattaagaagaatatgcccgttatgagtggtagtgggttaattggtcggattacagaagtaaataaaactaatagtaaagttgaattattgagtgatactagtgaatcatcaaaccgttttgcaattacccttaatggtcaaaatgggaaggtgattaacgggattatcaccggatataatgcaagaaataacgagcttgaaatgggacaagtaacttctaaagctaaaataaaaaagggtacccgagtagtaaccagtggaatgggtggtgtgacacccaagggactttacgttggtcgcgtgtcgcatgtcggtaaagatgattatggcctcgcccagaaaatctatattactccagcaacggactttaatgatattaatattgttacagttgctgaagcggcttcgcaggagtgataaattatgtatcgtttatcacgcttaaaatatatattcccaattggcttatttgtatgtctgtttttggacggagccttaagccatgtgtgggcaccattatttttcagttatccctattcaatggtgagtgaacttgtcttactatggttagtcttatcgtacttctttcaagatgatattgagattccattaattccatttgcaattgctgctggtgcagtttacgatttatacttttcgggaattttaggattgtatattttcttgtatccattagtagtcgaaataactaaaattttatctcgttattttagttcatcatttctttcgatgattatgattttctttgttgatattgtcatttttgagacgtttaattattgggcatattatttagtgaatattactaatgttggttttggcgactatcttatttatacgcttgctccaacgttagcattgaatttaatttattttgttgtcctcttctggccaattcgcgcaatatatcgctgggcattagacgatgatcaaatttaaaattagtgcttgacacaatagatattccagtataggatatttacaacatcataaatgacagtgaacagactagtagagctttaagcattgcaaagagagtccttaatgatgggaagggatcgatgctttggcttgaatcacatctgtgagttggccttctgaaagccatagtaggaagacccggggaagcccgttacagcgcggagtttattttaatgaactcactaaggctattattcgtgagaaaatagcaagatgaggtggaaccgcggaaacgccctcgtagccattttaggctcgagggtgttttttgtttcattaaaatagacttattaaggcaaatattgtgaaatgtttgtaaatatgaggtggaaccacgatgtactcgtcctctaggaggtatctcctagaggatttttcttttcctgttatttctattagtcaagaatttaaggaggcaatagtaaatgtcaatgcaatatataagtgaaattctaccttcattattccaaggggctgctcttacattacagattttcttctggacattagttggatcgctgccattaggaattttggttagcttaggacttacttctaaaattaagcctttgaagtgggtgttagaaatttatgtttggttaatgcggggaacgcctttgctacttcaactaatctttgtattctatgggttaccaattattggcattgtttttgaacgttacgatgccgccctagttgcttttattttgaactatgcagcttattttgctgaaattttccgtggtggtttccaatctgttgatcaaggtcagtttgaagcagctcgtgttttacgcctaagctactggcaaacccttcgtaaaattatcattcctcaggtaataaaaattgttattccatcaattggaaatgaagttattaacttagtaaaagattcatcgttagtttacgtaattggtcttggtgatttacttcgagcaggaaacgttgcaacttcacgggatgtcacacttgttccattgatgttagtcggattaatctatttgatccttgtaggaatttgtacattaattctacggcaagttgaaaaatgttatgcatacttcaagtaaaggagggaatctaaatgttagaagttcgagatttaaaaaagagttttggtgatcggcaaattttagatggggttaatttaacagttaaagatggtgagattctttgtattgttggtccatcaggtgctgggaaaacgaccttacttcgttgtattactggactggaaactcccgatagtggtgagtttttcattaacggtcgtcgctttgatcctcagggaacagatgcagctgaccgagtaatcggtgtggtttttcaagactttaagcttttcccaaatctttcggtaatggaaaatatcacgttagcgccgatgatggtattgaaaaaggataaacaagaagcaattgctgaagcgcaaaaactgcttgaagaattagggcttaataccaaaggaaaattgtacccctaccaactttcgggtggacaaaagcaacgggttgccattgctcgtgcattagcaatgaagcctaaaattttgtgctatgatgaaccaacatcagcgcttgatccaaacctccgaaaagatgtggctaatattattttgggattaaagaaggacggaatgactcaattaattgttactcacgatttagaatttgcggaagatattgctgatgatattttacgagtacaaccacttgatcaacgtcagaataaatagtgaaaggagatatactgatgaaaaaagcgaaagcaatttggttacttattttgttagtagtacctgttctccttcttagtggctgtgaaagtgtaacaaagcgtgctgatacgcaagatacatggaaccggattgagcgccgaaaaagagtaattgtcggccttgatgacagttttgttccaatggattttcgccaaaagaatggcaagctggttggttatgacgttgatcttgcccgggctgtttttaagcagtatggaataaaagttgattttcagccaattgattggtcaatgaaagagactgagttaaaaaatggtacgattgacttgttatggaatgggtattctgttaatcctagccgtgccaaaaaagttgcctttagtcgttactatttagagaatcggcagatattagtaactaaaaagaagagtaacattaaaaatctgaacgggatgacgggcaaaacactcggggtgcagaatggttcaacgggagtaaccgttttggatgagaagccaaagttattaaaggataaaataaagcaccatacaccagtactttatgatacatttcctaatgcatttattgatttaaatgcaaatcgaattcaaggaattttaatggacgaggtttatgctaattactatattaagcaccaaccaaatagtaattcgtatcgcacttatattagcaaagagctgccaatggaacattttgcagtgggaatgcgaaaaggtgacaagaccttaaagaagaaaattaatcaaggcttaggtaatttgcagaaaaatggtgaattacggaagcttaatgaaaaatggttcggtcaagataataactacttgggaccggataacactaaataaaaagagcagggacttaggaaatagtctctgccctttattgtttcctacaaacaaattaataaaaatatgatgaatttacgtaatcggtttgtaatttagtcatatttaacgtatcattattcagtatgataattcgaatgtaactaggttgcagctagtggaacccctcttgctgcattttatattgaagggagaaagagaacgtggattttaatcttgctcgtggcgtggacttgcacattatacccacaaaacaatttaagatgaatcacgtcttaatagattttgcgactccgcaaacaccgacgaatgctactgcacgaaatttattggcaaacctattagagaccagcacgcatcgctatccaacacagacggctttggctcgtcaactggcatctttatatggtgcttatgttaatttatatgttaaccggctggggacattgcatactgttcgattgcgagcaagttttgttaatgatcgctttgttgatgaagatttatttgaaaagattagtagcttaataaatgagatcattttctatcccctaatcgatgacggggaatttgatggtcctacttttaggattcaatctaataatttaaaaagtgcgataaagtcgctttatgacgataaacaatttttggctaatcaacgtcttatggacttgtactaccaaaatgattctgtaatgaaggttcctagtttcggtcaaattgctgatcttgagaacttaaatgctaaaagtttagtgtcaacgtatcattcaatgattaatgaagataaaattgatattttcgtgttaggtgacattgatccgatgcgtgctcagcaagttattgctaagttgccttttaaagatcgcgatattgctaataattcacctttatatcatcaagcattgtatgatcaagttcaaagaaaacagaataccaacaagtaaatcaggcaaagttaaatttggcatattctttacctgtctattatcatgatgctgattactatgctggtttggttttcaatgggctttttggtggcacgccatattcaaaactttttacgaatgtccgtgaaaaagctagtttagcttattatgcctctagccggctccttccatttaatgggattataagtgttcaaacgggaattcaagcgagtgatcaagaaaaagttcaaaatatgattcaggaacaattgactgccttgcaaaatggtgattttactactgagacgctgagtgaagttcaagatagtttgattaaccaataccgtgcaggtcatgatttggcaagtaatgttttggagcaacaattagttaccaaattagtcaatgaatcggataagaactttattactgaaataaaaaaagtaaccatagctgacgtcatgcgcgttgctaaacaaatgaaacttcaggcagtttatttattaagtggtgagaaataattatatggatagagaagtttatcaaaaatttaaccagtccatttatcgtgaacaattatcaaatggtttgaaagtccagctcttaccaatggaaggctaccataagacatatgctattttaacagctgattttggctccattgataatcattttataccgtacaatcaaaaggaggcgattactgttccagacggggttgcccacttccttgagcataaaatgtttgagaaaaaagatcatgatgcctttgatttgtttggtaaactaggagctgattcaaatgcctttactagttttactcaaacaagttatcttttttcgaccactagtaacctccatgagaatttagatgttttgttagattttgttcaagatccctactttactgcagagacagtgaaaaaagagcaggggattattggccaagaaattcaaatgtatgaggatgatccgagttggcggctttacctaggtattttaggcaatttatatcccaaagatccaatgcggattgatattgcgggaacggttgaatcaatcagtcatattacaccagaaattttgatggatagttaccggactttctatcaaccaaccaatatgaaccttttccttgtaggacgcttagatccagaagaaacaatggggtggatcaagcaaaatcaagaacaaaagatttttgctcccgcagagacaccccaacggttatttagcttgaacgatccaactgctcatgatgtaattccatttcgttcattaacgatggatattgttcgtcccaaagtgatggtaggtttacgggggaccaagcaatttgatgatggtaaagaacggctccactacaaattagcaattgatcttttgttagatgttttgtttgacgatacctcagataattatttgcgtttgtataataatgaaacattagatgacacgtttagttacaattttgaaatgcaacggggctttcactttgcgtactttagctctgatactgatcagatggaacgctttgcagatgaaatcattgatattcttgaaagtgctgaccagcaaattgaagcggcgcggacaaggtttgagggaattaaaaaggcagaactagggcggttaattggcttattagattcgccagaagcaattgctaatcgttatgctggaaacctctttgccggtgctagcttgatggatgagatagcgaccttggaaactatcacgattgatgatctttatcaagttgcaaaagagttcattactcctcaaggtatttcggtataccaagttgttccgcaacatcaataaactaaacttttcctatagatttattccgataagctaatatataattgagcatgatataatatccaagagtaaagataaatgaaaatggagatagaataatgagtgagaacgagaacgatcaaaaacgactagaaatcggtaaaattttacgaaaagcacgggaagaaaagggctatacccttgatgaccttcaacaaatgactaagattcaaaagcggtatttaatcgcgattgaagatgaaaattttgatgaacttcctggtgacttttatgttcgtgcgttcattaagcaatatgccaatacagtgggcttagatggtaatgaattattgcaaaaatacgatgatcaattaccacagactaaaacggaagagtattccgaccacttggctcaagcagttgaaactcgtgcaaaccaacgaaaaactgttagtgggagcgtagataaagttcgtaactacatgccaacgattattattgcttgtgtgattgttttagtgttggcagctatttggattacggccattgctcgcaatcatcgcgattcttctacacggattgataatagttcagtatctgtttctggagagagtcgtaagaaggcctctacctctgctaaaaaggcaagtacaaagcaaagcaaatcaacggcaatcaagcttcaagaagcacctaatcggaatgacacaagcgttacttacacagcaagtcaacttactaaagacacaacgctacaaattgaaccaagtgatcgttcttggatgcaagtaagagcaaataataatgatttattaaacagaactttgaataacaatgaaaaaactagtgtgaaaataagtcgtgatacaacttcattaataatcacggttggcaatgcccgggcaacaaaattaaaactcggtaatcaagaaatcgactttactaataatggccgttaccagaacacgcggaatgtaacgattaactttggacgtacccaaacaagcagcagttcagcaagtcagccgtcaaatagctcaagccaagcttcgtcatcctcggcacgtcctaataatgctactcaaccgtctgctgctaataataacagtcgtcctcagacaaatgctagtcaacaaagtaatcaaccaactcgttaattaagaggactaaaggagttagaacattgaatttaccaaataaactaactgttatacgtttaattattattccctttttcttattattaatggtgctgccattacaaagttggggagctgtaagtttttggggagcaactatcccgatggctcagcttattgctgctattttatttattgcagcaacaattactgataatcttgatggacaaattgcgcgacggcaccatcttgtaactaattttggaaagtttactgatccgcttgctgataagttgcttgtcatgactgcatttatcgttttaactggaaatggtgttgttccatcatgggtaacttcaatcattatttggcgagaattgtctgttacgggcttacgtttattgttagtggaacaagacggggtagtattagctgctaaaatgccggggaagattaagacaactactcagtttattgcaattatcttcttactcttaaataatgttatttttgctatttggaatattccatttggccaaataatgttatatatttgcttgttctttactatttattctggagtggattacttcatccagggacgcgatgtcttttcggatggatttaaatagaatatggagggtgagaaaaaacttttgttttttctcaccctcatgttttttatattcatagttttaagattttagtgaaaatgactatactttacgtatatatattaataggggatgaagttttatggatgcagaaattatctcagtaggaactgaaatagtccttggacaaatagttaatactaatgccgcgtacttagctaacagactaacccaacttgacttaccggctacttatcaaacaactgttgacgatcaatcacagagattagagcgggttattaattacgctttgactcgtgctcaattagtttttgtttgtgggggactcggaccaactgcagatgatgttacgatgcctacagttgccaaagtcttagggaaagagttgtggactgacgaagaacactggaaatggattcaaaaaacatttgagcaacggcaaataaaaatggaaccagagaatattcgtcaagcccagtatccacggggaggcgagccacttgccaatcctgttgggcttgctctaggatgttggtatgaaactaagggtaaagttgtggttgtcttaccaggaccacccgccgaatttaaggcaatggttgaaaagagtctgattcctaaactccagcaatattttcaaacaggaaaacaaattaccagtcggacattaaactttttagggcggccggagtcacaattaatggatgaaattgaagaggctactaacgatataccagggataagcattacttcttatgttcaaccaacggcaattcaggttcgactcaccgtgcgtgacttaccagtggttgaagctgaagaaaaaattgatcaggcacaaagagcaattcttgcagttgaagaaccatttttctttggagcgggggatgaccttacacttgccaaagtcgtcgttgaacaattaaaaaatcgcggatggaaattgacagcagcagaaagcttaacaggggggatgttccaaagtactatttgttccgtaccaggagcctcgactgtttttaatggtggttttgttacctatgctgctagtgcaaaagaaaagttattaggaattccccacgacactattgaccaatatggggtagtgagttctgaaactgctgcggcaatggcagaagggtgtcgacgaaaattaaatgttgaagttgggattggctttactggtgtggccggcccagatatgttagaaggacaaccagcggggacggtctggattggactagcaatgaagggatgcccaactaaaaccgttcaattacatcttgcatcctatgttggaagacaggcgattcgtacattaagtgttcagtatggacttcaattaatttaccgtgaactaaaaaaataaacgaacttttgttcacttttttcttgtttttttggctaaaactgttattattagttatcggataaaccgtaaaaaaaggaggaatttgatttggctgaccaacgaaaagcagcattagatgttgctatcagaaagatcgaaaagaacttcggtaagggctctattatgcgaatgggtgacgccactgatatgaaggttgcttcagtttctagtggttcccttgctattgacaaggcacttggaattggtggatatcctcgtggtcggatagttgaaatttatggccctgaaagttctggtaagactactgtagcattacatgcagtagcagaagtacaacgtcaaggcggaacagcagcctatatcgatgctgaaaatgcgcttgatcctcaatatgcagaagccttgggtgttaatattgatgacctattgctttcacagcctgatagtggtgaagaaggattggaaattgcagatgcattgatttccagtggggcagttgacttagtaattgttgattcagttgcagcattagttcctcgtgctgaaattgatggtgatatgggtgatacccatgttggattacaagctcgtttgatgtctcaggctcttcgaaaactttctggcgaaattaataagacaaagacaattgccatctttattaaccaaatccgtgaaaaagttggagtgatgtttggtaaccctgaaacaacaactggtggacgggcacttaaattttactcaactatccggatggaaattcgtcgtgcggaacaaattaagaatggtacggatgttattggaaataaagctaaagtaaagattgttaaaaataaggttgctccgccattcaaacggtgtgaagttgacattatgtatggtgagggaatctctaagactggtgaattgctggatatggcagttgaaaacgatcttgttgacaagagcggtgcatggtactcatatggtaatgagcggattgggcaaggtcgtgaaaatgctaaaaagtggcttaaggaacacccagatagcatgaatgaattaatggataaagttcgtgttgcaaatgggatggaaccgttaaatgaaaagtcaacgaaagaaactgctgatgataaagccagtggtaagaccagtgaaaataaacaagaaacaattgaagaagcaagtaaagaataaataataatatttgaagttgaaattccctaattttttagcattaatagctgaatattagggatttccctttttatactggctgtttaagcaattgataaattcaatagttgacaccttagtgtggcaagattaaaatttaacttgtgtgatgttttttgacgttacacggtgaaattaatttattcataccaacaacataatagttgaagcggaggtgaaatagtgaaaattttaatgttcgccgcgcttgctatggttgtcggaattattgtcggctatgtaattcgcaaggtttcatatgaaaaacaagttgcagaagcacataatgatgctaaaggtattatttctaaagcaaaacaagaagcagtaacggcgaaaaaagaagctattttagaagcgaaagaagagagtcatcaataccgcgagagagtggaagatgagttaaaacagcggcggagtgaggtccaacgacaggaagaccgattactccaacgggaggcttctttagatcataaggatagcgctctagaaaaaagagagaatgcagttggtgttcgtgaacgtaaattagatcaagaaaaagagcagcttcatcaatcaaaggaacaagcagaagccttaattgaacaacgcaaacaagaagttgaaaaagttgctcaaatgtcacaagaagatgctaagcagttattattatctgaagtaaaagaacagttaaaaactgaacgagcagtaatgattcgtgacagtgaacaagaagcggaactttctgcagaacgtaatgcaaagaaattaattgttgaagcaattcagcgtagtgctgcggatgttgtctcagagacgactgtttcggttgttaatcttcctaatgatgatatgaagggaagaataattggtcgtgaaggtcgaaatattagaactttagagacgttaacaggtattgatttgattattgatgatacgccagaagctgtcgtattgagcggctttgatcctgtacgacgtgagattgctaagatcgcgcttgaaaaattaattcaagatggtcgtattcatcctgcacgaattgaagaagcagttgataaggctcgtaagcagatggatactcaactacgggagactggtgagcaagcattgtttgatctaggaattcattcaatgcatccagacctaattaagacggtcggaagaatgaagtaccggactagttacggtcaaaatgtcttagaccactcaatcgaagttgctaagttagccggaattatggctgctgaacttggggaagatgttacattagcaaaacgtgctgggctcctccatgatattgggaaggcaattgatcatgaagttgatggttcacatgttgagttaggtgtagaactaacccgcaagtataaagaaaataaagtggttatcaatacgattgcttctcaccatggagatgtccctgctaattctgtaattgctgttcttgtacaagcagcagatgcaatttcaggggcccgtcctggtgctcgaagcgagtcattagaacaatacattcaacgtttaaagaaactagaaagcatagcaaacagttatgatggtgtcgaccatagttatgcaattcaagctggtcgagaacttcgcgtgattgtcaaaccgaagaagatttctgatttgcaggcaacaactttgtcacatgatattaagaacaaaattgaaaagcaattagaatatccaggacatattaaagtaaccgttattcgggaagttcgagcagttgattatgctaaataaactgatttttcagttcctataaagaggctgggtataaccttcagtctctttattattttaaataacatccatcatttatagagatcttgcagcaaatttagacacaaaatataattagtttattattaagattaaaaaatatattaatggggtgaaatttagtggcaaaaaaaacaacaccgatgatggaacaatatcaaaaggtaaaagatcaatatccagatgcctttttattttaccgacttggtgatttttatgagctatttaatgacgatgcggttaaaggagcgcaacttcttgagctaaccttaacaacgagaaaccatagtgcaaaaaatccaattccaatgtgtggagtgccccatcgcgcagttaacaactatattgatattttaattgataagggttataaagtagcaatctgtgaacagatggaagaccctaaaaaggcgaagggaatggttaaacgagccgttacccgtttaattacacctggaacgcaaatggatttaaatggtgaacaggcacgtgataacaattatcttgcagcgattagtggacaaaatggggtatttagtattgcctataccgacttatcaactggggagcttaaaacgacaagcttaaataatgcaaatgacgcggttaatgaattggttaatctccaaagcaaggaagtagttgtggacggtgagttgccagctgaaataacaactcagtttaagcaacgaaatattcttcaatcacatcagccaacggtccttaaaaatgctgagatcagctatcttactcaagaccttgatgatcaagcccaacagcacgttgttgcgttacttgtgtcatacttattaacgacccaaaagcgctctttggcccacctgcagaaagcaattgcatatcaaccaagttcttttatgaagatcgatcactattcaaaaacaaatctcgaattaatgcgcaatatgcgaagtgggaagcgtcaggggaccttggcatggcttttggatgagacaaaaacagcaatgggcagtcgtcttcttaaacggtggattgaccggccgttgattaatcaaaatgcaatcagtgaacgacaagataaagtccaagagttattagaccactattttgagagaagtaatttgcaacaagagttaattaaggtatacgaccttgaacgcttagcaggacggattgcctatggaagtgttaatgggcgtgatcttattcaacttaagacttccttaaagcaagttcctaaaataaaatacgttttagaaacccttgattcacctgtctttgaagaattgcaaaaacaattggatcccttggacgatgtggcagatttaatcgatcaatcaattgttgaagaaccgccaattgctgttactgaaggtggcgtgattaaggatggctataatgaccaattagaccaataccgtgatgcgatgaataatggaaaacagtggattgcggacctgcaagaacatgaacggaaattaacgggcataaataacctcaaaattggttataatcatgtatttggctattatattgaggttacaaaagttaatcttaataagcttcctaaagatcgctatgagcgtaaacaaacattagttaatgctgaacgtttttctactccagaattaaaagaaaaagaggcattgataatgggagcgcaagaaaagtcaacagccttggaatatgatatttttgttaaaatccgtgaacaagtcaagggacaaattacacgcctgcaaaaattagcacaacaacttgcggaattagatgtactccaaagctttgcggttgttagtgaagactaccactttgtccgtcctaaaatgaatactggtcacgtattaaaaattaaagatggtcgtcacccagttgtggaaaagtttatgggacaccaggaatatgtgcctaataatgttttgatgggagaagataccgatattctcctgattactgggccaaacatgtcagggaagagtacctatatgcgtcagctagcattgattgcggtaatggcacaaattggttgctttgtccctgctaaatccgctgaattgccaatttttgatcaagtctttacgcgcattggggcagctgacgacttaatctctggtgaaagtaccttcatggttgaaatgatggaagccaataatgctttgacccatgccacggatcgtagtttgattctctttgatgaaattggccggggaaccgccacttatgatgggatggcattggcgcaagcgattattgagtacgttcatcagcatgttcgtgctaagacgctattttcaactcactatcatgaactgacagctcttgagaatagcttgacgcggcttaaaaatgtccacgtaggagcaacggaaaaagatggggagttagtattcttgcataaggtaagtgcaggtcctgcagataagtcttacggaatccacgtggctaaactagcgggaatgccatccttattgttaaaacgtgcagatactattttgcaaaaattagagcaaaaggatgtaaaactaccgaatgcgcctaaaccggcaacagataattaccatacagaaccaatatcagcaaagataaatgaagcggcaccggtaaagaaagagtctgcaccagttgttgaagataatggtcaacttgaattatttgctactcaacctgagaaaaaagaatcgagtgttgatcggcggattttacatcaattaaaagaacttaatttaatggggatgacacccatggatgtaatgaatcaaatttataagtggcagcagaaattgaaataaggtgatatttaatgggaaagattcatgaattagataatattttagccaatcaaattgctgccggtgaagtaattgaacgtccagcatcaattgtaaaagaattagttgaaaattcattggatgcccatagtcaccgtgtagatattattgttgaaaattcaggtttagacagtgtgcgcgtgattgatgatggtgacggaatcgctgctgaagatattagactagcatttcaccgtcatgcaaccagtaagattaattctcgccatgacctctttaaggtgcagacgatgggctttcgtggtgaagcgttacctagtattgcttcagtcgctgatgtaacgcttacgactgcgcaagctggtcaagaagaaggaacaatgattcatttgcgaggaggaaaagaattagtagtgaagccggctggtgcgcgtcaaggaaccgatattaaggtaaccgacttattctttaatactcctgcgcgattaaagtacttaaaatcacctcaaacggagctaaccagaattacggacatcattaaccgacttgcccttgcaaatccagcggttgcttttagctttacccataatgggcgggaattatttcggtcggcaggtaataataatttacaacaagtagttgccgcaatttatggcgttcaagcaggacgtaagatgcttgagataagtggtgcagatgatgattttaaggttagtggttttgtttccttaccagaattaacacgtgcatcacgtcaatatataacaatcacaatcaaccatcggtatattcgtaattttgaattaacaaaggcaattactcagggatatgaatcaaaactaatggttggtcgttatccgatcgcggtaattaacattgatctggaccctgttttagttgatgtgaatgtccatccagctaaacgcgaggttcgtttgagcaaagaacagcaattaataaaattgattgctgaaacgattcggcagcgaatagcagttgagaacttgattccggatgtcgatgctgaccaatttattcctaatgatgatgaggtagcggaccttgatcgccggttaaaggaagcatcacctgtttatcacgccgcaccgatttcggcagtgccggcaacagaaaaggcagcaactgagatttcaactccagcagctgataatccagcacatgctgacgcgcttgatagtgagattccagcaccgatcgttatccaccatcttgaagatttaaatacgctcgcaatgcaaaaatttgatgagcgttatcaaaatgaaggtgaagttacgccattttctgctccagttcccactatgactaagaagccagtaaaacctgcaaatattgaattggatgttcatgataaacaagatcagcagcaaaatcggtttcctgatcttcaatatattggtcaacttcagggaacctttttattagcacaagcaggagatggtctttacattgttgaccaacatgctgctcaggagcgaattaattatgagtattaccgccaaaaaattggggaagtgagcgctgatcagcaaaatttcttggttccgcttgttcttaattattcgactgtcgacgcaatgacaattaatcagcatctcgatacgcttgcagcggtcggattagaattagagtcatttggtcaaaatagttttattttgcgctcccatccaacctggtttaaagaggggcaagaagaagacacggccaaagaaatgattgattggttaattaagaatggaaagctaaccgtcaaagaatttcgaatgaagacagcgattatgatgagctgcaagcgggctataaaggctaaccaccaccttgacgaacgggaagctaaagccttgctgaaacggttgccgcaatgtgagaatccttttaattgtccacatgggcgtccggtaactgttcattttaatgatcaggatttagaaaaaatgtttaaacgaattcaggattcacacaccccatatgcagacgattttgatgatcatgaattttaaggaggaactaccttgtacgaatacttaacaggccttgtaactgttgttgcaccacaatatatcgttgttgatgttaatggggttggctataaattattagttgctaatccctatcgttatcaagaggatcggactaagaaggtccaagtatatgtttatcaagcagttcgtgaagataatatttccttgtttggcttcacagatcaaaatgaaaaaaaactatttatgcaattaatcaatgtttctggaattgggccaaagagtgctttagcaattttagcgaaccctgatcatcagggacttgttgatgcaattactaataataatgttaactatttaactaagttcccaggaatcgggaaaaagacagcttcgcaaattgtgttagacttacgtgataagctcactaatgaaagcagcagctcattatttgcaacaactcagcttaccgttgatgcaacagtaaatcgtgagttgaaagatgctttggaagcattggctgcattaggatacaaggaacgggacattaaaaaggttcaaaagacattaatgaaagaagaacaaatggcaactgatgaatacttaagacaagcattaaggttgcttaactaggaggtgcaagacttgtggaaaatgatcatggtattttatcagatcacccatcaggagaagaagaaaaccaagtggagataactcttcgaccacagaaactaagagaatatattggtcaacctaaaatcaagcacgaactagaagtatatattaaggcggcccaatcccgagaagaagcccttgaccatgtattgttatatggtcctccaggattaggaaagacaactttagcgatggtaatagctaatgagatgggcgttaatatcaaaacgactagtggaccagcgatcgaaaagccaggagatttggttgctttattgaatgagttgaaaccgggggatgtcctttttgttgatgaaattcaccggttacccaaagttgtggaagaaatgctttattcagcgatggaagattactatattgatattgttattggtgagggaccgactgcgcaccccgttcattttccccttcctccatttacattaattggggcaacgacacgagccggaatgttatcggcaccattacgtgatcgtttcggaattgttgaacacatgaactactatactcaagatgaactgacaaaaattatttttcgttctgccaagattttccatactagtattcaaaatgaaggggcccatgaactatctcttcgttcacgtggtacgccgcgaatcgcaaaccgccttttaaaacgggtacgtgattttgcccaggtagcagggaaacaaagcattgattcagcaattgttaagcaagcattatcgctgctccaagttgatgatcggggcttagatgagattgatcggaaaatgttgttaacgatgatcaatttctaccatggaggtccagtgggattaaaaacaattgcagcaaatattggtgaagaaactaatacgattgaagaaatgtatgaaccatatttgttacagatcggctttattagtcgtactcctcgcggccggttagtgacaccgacagcatatgaacatttaggaattgaatatccaactgatagaaattgattgaggaaaattatgagtaagttagaatttacaattaatcaaagcgatggccaagcacgaaccggaattttgcagattaatggacgacaaattgaaacaccggctttggttgccagtggagatgaactagcaaaattatcacccaaccagcttaatcaggctggtgtaagtgcagttaagacaagtggattaaagcgttggctaaaatatgattcgatgactgaaaaattaggagacctccaccaactttttcagtgggatggccttttatttgtggatttagaaactgaggaggcctatcacttagcaaagccacgcgggaaaaaacatgatggcgttcgttttcatgatccgataacgggacaattaaaattctggcaaccagaaactgctcttcaagttcaagaagcgctcggggctgatatttttcaaagctttgaccaagcaacagattattatgcgccagttgatgatttaaaagtaggggtaaaacaaactaataactggttatctgttgttaagccccaaaaaggccaagcccttggttcaattgttggtggcggcttaaaagatttgcggacagccagtattaaggcggtcgatgaggctgggttaagcggctatcggttgagtgggatccctagcagcttagatgatcaagagtttagtcgaatcattaatgaaattacgcctaaactaggagaggagaaactgcgctacctccctgctgcactttcttttgaccagctgatagaggcaattttagcaggagttgatttaattgatagcaatctagcagctaaaaaagcggctaatgggattgcattagttaatcaaggagtgacagttcttcatcttgatcgtcaacattttagcttcgattcacaagtgcttgatcgtcaatgtgcgtgtgcaacttgtcgcgcgggctattcaaaagcactactccatagtttaattaccaatcaaagtttttacggtgaacaacttttgctgcagcataatctgtttaccctcaataaattaatgagtagtctccgacaagcaattaaaaatcatcaaacaaaaaatttgttcaagaattattgcagaatcaatagagcatatagctttttatggtaaagtttgttaaagttaatattagttaactttttgaagggatggataaactgtgaatagtttgagtagttttgttcttggtgctgcttcatctaataatgcaagtggttactcaagaattattttaatcatcttaatggtagcattaatgtacttctttatgattcgcccacaacaaaagcaacgtaaagaacatcaagagatgatgaatgaattacacccaggtgatgaagttgttacgattggccggatgcatggtaagattgattcaatcaataaggctgaccggacagttactttagattgtgaagggatctaccttacttttgatatggtggcaattgcccgtgttattaaacgagcagatgcaccagctagtgaagttccccaagataataaagctgttgctagttctgccgctgacagttctgcagatgcttcagcagatagtgctgctagtgaacctacatctgcagcgagtgctagcgatgaacaaaaaggcagcgaagaaaagtaatttaatttagatgaaaatagtcgtaaacaggcgaatattttcatcttttttatttggttgttaatcgcgtttattgctatactaaaagatagtgttaaattttattcgggtaaggagaatagcataatggcagatccattaacagcaatttttgaacaaatcaaaaaatacaataaaataattattcatcggcatcaacgccctgatccagatgcaattggctcacaagttggccttgcggaaattttgcgggcttcattcccatataagcaaatttatgttgtagggaagcatattccagggtttgattggatcggtgagatggatacgattgacaatcagacattcgatgatgcattagtaattgttacggatacagcaaatgcgccacgaattgatgatcggcgctttgataatggggacgaacttattaagattgatcaccaccctaacgatgaaccctttggcgatattatgtgggttgaaccagatgcttctagctgttctgaaatgatttatagtttttatcaacgatttgcaaaagaattaactcttccccagaaggctgcccatgccttatatgcaggaattattggcgatacaggtcgtttcctttatccagcaacaactccacgaacgatgctagttgcaggttcgttaatggcagccggcgcaaatgccgcggaaattagccagcacgaaaatgaaattaccttaccagtggcccggttatcagcatacgtttatgaaaatttgcagatattagataatggagccgcatatgttatcttaaccaatgaaattttagaacaattcggattgactgaagccgggacatccgcaattgtttctttaccaggtcgaattcatgatgttattgcctgggcgatctttgtagaacaagaagatggccattatcgcattcgtctccgttcaaagggaccaacaattaatgaattagctaagcagcacgatgggggtggacatccacttgctagtggcgctaaggctaaagatgaagcagaaattaaacaagtgattgatgaattggaccaattaacacaaagttatgcaaaccaaaaatgaaagggaaatagctatgagtgataaaaaatttgctgattttcagttacaaccttatctgttaacagcaattcaaaaaattaattttcgtcaaccaacaccggtccaacaacaagtaataccagtgattatggctggacgaagtgttgtggggcaatcagcaactggtagtggaaaaacacatgccttcctcttgccgattttttcaaagattaatccagaagatcaaaccgttcaagcagtaatcacaactcctagtcgggaattagcataccaaatttataatgcggcaaagcaacttaataagtatgctcctcatcctcttaccattcacaattatgtcggtggtacagacaagcagcatcaagttgaccaattaagtcgaaaacagcctcaattggtcattggaactccgggaagagtattagacttaatcaagagtcaggcattggatattcacacagcaaaaatgtttgtggtggatgaagcggacatgaccctagatatgggattcttacatgaagttgaccaaattgccagtcattttcctgatgaccttcaaatgatggttttctcagcaacgattccgcagaaactgcgcccattcttaaaaaagtatatggaaaatccagtaattgaagagattcctactgaagcagtaattaatccagatgttgataattggttaatgtcaactaaggggcaggaccgtaaccagctaatctatcgtttgctgactcttggtgaaccatatcttgcattggtatttgctaatacaaaagaacgagcagttgaattaacccagtatttagaaaatcaagggctcaaagtagcgatgattcatgggggactggaagcccgtcgtcgtaaacggacaatgcggcaaattcgtgatcttgaatatcaatatgttgtagcaactgatctagcagctcgtggaattgatattgatggagtatcactagtaatcaatgacgacttgccaactgatcttgaatattttgttcatcgggttggtcgtacagggcgaaatgggatgaaaggaacagccattaccttatatgaaccagcagaagatgatttaattgctaagcttgaggagcgcggagttaaatttgtaccaaaagaattaaagaatggtcaactagtaactacccatgaccgtaatcgtcggaagcattataagcggcggcaaaatgaacttgatccgtcaatgaagggttacgtaaaaaagactaagaagaaggttaaacctggttataagaaacgaattaaaaaggcgattaaagaagacgaacagcaaaaacgaaagctagaattacggcataaaattcggaaagctaagcgtgcacgacaaaaacaacatcgccgtgaacgaaatgcccgttgattttaaagtaattgttcgctataatatgacacgtttgggacatgctataactaatggaaaatttcagagacagttggtaaggtgtgacaactgatttcctagccttagtgctccccattcggataatttgatatttaaccttgggcaaccaagaagtaaagaggtaaacgaattccatcgttgcaagcagagtggtaccgcgtcaatctggcgtctctgattcgcaatggtggttttttgttttagaaggggcgatttgatgaaagagttaaagaagctaaatagtgctcaagtacggcggatgtacttgaagttttttgaagagcatggccaccaagttatgccgagtgcatcattagttccagtaaatgatccaacattactatggattaactctggagttgccacaatgaagaaatactttgatgggaaagttgttcctgataatccacggatgacaagctcacaaaagagtattcgaacgaatgatattgaaaacgttggtaagactgcccggcaccataccatgtttgaaatgttaggtaacttctctgttggtgattactttaaaaatgaagtaattccatgggcttgggaattactaacaagtgatgaatggtttggttttgatcccgaacggctatacattacttattatcctaaagaccatgacgcttacaatcgctggcgtgaagtaggcgttgctgaagatcacttaattgctgatgaggataacttctgggatattggtcaaggtccatctggtccagatacggaaattttttatgatcgtggtcaagaatttaataatttagccgatgatgatccagaaaactatcctggcggtgaaaatgaacgctaccttgaaatttggaacattgtctttagtcaatttaaccatacgcctgaagatacttatgaaccacttcctcataaaaatattgatacggggatggggcttgaacgggttgtttcgatctttgaaaatgcccctactaactttgaaaccgacttatttatgccattaatcaagcaagctgaagagtttagtggtactaagaagtatggtcaaaataaagaagacgatattcaatttaagattatcgctgatcatattcggacaattacctttgcgatcggggatggcgccttgccttcaaatgttggtcgtggatacgttattcggcggttgcttcggcgagcagttgttgctggaaagaagttgggaatcgatgaaccatttttagcaaagatggttccaacagtcggcaaaatcatggaagattactatcctgatgttcttaaaaatgctgactatattgcttcggttattgaatcagaagaagaccgctttagtgcaaccttaaatggcggattaaacttgttgaataacgtgattgctgaagctaaggaaagtaagaccaacgaaattgatggacgaacagcctttaagctttatgacacttatggcttcccaattgaattaaccaaggaatatgctgaagatgaaggactaacagttgatgaaaagggcttccaagcagcaatgacggagcagcaaaatcgtgctcgtaatgcccgtgatatggataacgggatgggtgttcaaactgatttatggacttcattcaaagaagatagcaaatatgttggctacactgatttgaccgttgataatgcaaaagttatcggcttagcacatgatggtcaacaagcggatgaagcacgaccaggtgataagaacattgaactaatttttgatgtaacgccattctatgcagaaatgggaggtcaagtcgctgatactggtgacattattgataactatggtaaaaaagttggccgtgtggttgatgtccaacacgcaccaaaccagcaaaatcttcatcgagtagaattaactgcccctattaaaaagggtgcccgttacaaactagttgttgaccgtattcgtcaccttaagattgaaaagaaccatacagcaacgcacttgttagaccaagcattacggaacgttcttggtggtcatactcaacaagccggatcattagttgaagaacattacctacgttttgactttaaccactttggtcaagtaactgctgaggacctcaagaaggttgagaacatggttaatgagcaaatctggaaggaaatcccagtcaagacagttgaaactgatattgattctgctaaggaaatgggtgctatcgccttattctcagataagtatggtgataaggttcgggttgttaagattggtgactttaacactgagttctgtggtggtgatcacgttaaaaatactaatgagcttggtctcttcaaaattgtttctgaaggaggagttggtgctggagtacggcggatcgaagcagtaacttctagtgatgcctttaagttcctccaagatcgtgatgacctcttaacaaagagcgctgctagtttgaaggttgctcagattaaggaagttcctcaccaagtagaaacattacaaaatgaacttaaagaagctcaaaagcaaaatgagtctcttcaagctaagattgctgctcaacaagctaataatgtttttgaaaacgttcaagcaactaagaatggaagtttaattgctgccgaagttcaagttgctggaatgggtcaattacggcaacttgctgatgcttggcgctcaaaggctctttctgatgttctggttcttgctacagccagtgatggtaaagcaaacttattagtggctgttagtgatgataaaactaaggaaggcttaaaagccggtgaccttattaaggcgattgcaccagccattaatggtggcggtggcggtcggtcaaacctcgcccaagctggtggaaagaatccagctggaattaaggaagccttaagtcaagctaaaggttacctcgataagtaaatcaaaaatgagaaggaaataaccatctcatagtctaagagattgaaagaaaccaatttttgagttctttcaatctctttttgtaagaacttcttaaagtaataaaaaaatactatcaagaaatcctattatcagctataattataaaactaatattactgtttacttacaattgacaaatgtaaattgtgattttaataagaatatagtaaaattgatggttgaaaggaatatctggaggtgacgattgatggctacaaatgataaaacgatgttctttgattttggtcaagaacgtcaagaagatattaagcaaacattaaagacggtttatgaatcattagaagaaaagggatataacccgattaaccaaattgttggttatcttttatctggtgatcctgcttatattccgcgtttgaatgatgcacgtaacttgattcgtcaacatgaacgtgacgaaattattgaagagcttgttcggtcatacctaaagaataacggtgaaactaaatgagattaatgggattagacgttggctctaaaacggttggcatttccgtaagcgatcctctcggttggacggcccaagcagttgagattattccaattgatgaagaaaacgaaatttttgggattgatcgtgttgccgagctagtgaaaaaagaacaggtagctgggtttgtaattggccttcctaaaaatatgaataatacagaaggccctcgtgttgaagcatctcagcactatggcaagctattacaacaacgttttccagatattcctattgactttcaagatgaacgtttaacgacggttgaggcacaccgaatgctagttgaagaagcggacatttcacgtgctaagcagaaaaaagttatcgatgaagttgcagcaacattcattttacaaagctatttggatcgccatggccgccttgtgaataagctaaaatgaggtattaaaatgagtaaacaagaaaataacgaagacatgattacgttaattgatgaaaatggtaatgaacaattatttaaggaattgtttacgtttgattctgatgattatggcaaatcctatatctttatctatccagcggaacaagaaaatgacgattccgttgacattcaagcttacattatagctgataatgaagataacgatggacaggaccttgtcccaattgaagatgataaggaatgggacatggttgaagaagtattaaatactttccttgataatgatggcaacttcaaggcctaattaaaattactggataaataaaatattaacaaaagggagctgtagacacatttgtcacagtcctttttctttacaagcagaatgaaaggatcattaggatgattttaacaacctttattattttgattttaatggggtgctttattaatggtcatcgccgcggattattgacaatgacgttaatgctggggacatatatagtagcttggattgttgctcgccagggagcccaattgattggtggctggttaaaatcgttattaccaagtattggaaccccggcaactttttccgagagcttgcttgcaaatgtaaatagtaatcttttcttttataatgggattgcatttatgataatttttacaattgtttcaattctttgtcactggggaattcgtcagttaaactggataaagaggattccagtggtgggaacagttgataagatcgcaggtgggttaatctcatttttaattggctatttgattatttacgttgttttactaattatgcaattatttccagcaggttggtggcaaatgcaaatagcaaactcggaactagcgcgttttatgattaatcaaacaccaggaatagcgcatttagtaattgatacgctagtacagggaggataaaatgaacaacaaaattttagaaacattagaatttgatcgaataaaaggacaactggcacaataccttgtttctgccgctggtcatcgcgaattgacgcagcttgttccacagactgattatgaggcagtcaaagaacttttgacagaaactactgatggggccgatattttaaggttagaagatgggattcctattccgcaattagctgatatcaaaccgcaattgaaacgtttgaaaattaaggcaaatctgaacggcacggaattagctcaaattactaaagtgctgcaaactagtatgagtgtaaaaaacttttttgatcagatgcgggagaaaaaaattaaactacgggttttaactacccaagttgaccgcctagttacaattccttcaattacccagcggctagttcgttcgattgatcctgatggacggataaatgatgaggcatcagctaaactccatggtatccggcaattaattacccaaacggaaacagagattcaccaacaaatggaaaggtatactcgtgggaaaaatgcgaaatacttaagtgaccctattgtcacaatgcggaatgaccgctatgtgattccagtaatcgcccgctatcgaaataaatttggtggggttgttcatgaccaaagtgctagtggacaaacattatatattgaacctgcagccgttgtggagaccaataatcggttacgacaagcgcaaatagaggaacggcaagaaatgcaacgcgtattaattgagttatcacaaatgattgctccttatcgacatgatattggtcagaatgaagcaattcttggacaccttgactttattaatgcaaaggcacgctgggcacatgatactaaggcaacgctaccgctcttaaacaaagaaaatcatgtttcattacggaaagcgcgtcatcccctgatcgatccccaacgagtagtgacaaatgacattaagattggggaagattaccaagcgattattattactggacccaacactggtggtaaaaccattacgcttaaaactttaggaattattcaattgatgggacaatctggcctatttattcccgcagaagaaggcagtacaattgggatctttgataatgtatttgcggatatcggtgatgaacaatcattggaacaaaatctgagtactttctctggtcatatggatggagtaaaagccattcttgaacaaattacaagtcgtagcttagtccttctagatgagcttggtgctgggactgatcccaaagaaggggctgctttagcaatggcaattcttgataatattggcagtaaaggaaccatggttgtaattactacccactatcctgaacttaaagtttatggttatgatcgtgctaagacgattaatgctagtatggaatttgaccaagaaactcttaagccgacgtataaattactactagggattcctgggcggtcaaatggattagagattgctcagcgattaggaattagtccccaggttattgatgaagcacggacatttgttagtgataatagtcaagaccttaacaatatgattggtgatttagtagagcaacggaaaaaagcacgtgaagaaagtgaaaagctagcaaaactagtagccaaaaatgaaaaagttcagcgtgaccttgataagaaactcacccgctttaatgaacagcgcgataagctatacgaacaagcacgttcaaaggccaaccatcaagtttcgatggctaagaaaaaggctgaccgaattattcatcatttgcgccagttagaagttcagcagggcggaaatgtaaaagaaaatgaattaattgatgcacaagggcaattaaacgctcttcatcatgataatccacggttgcaacacaactctgtattacaacgggctaagcaaaaacatgatttgcataaaggtgatgcagtcttggtgaaatcttatggtcaatatggagaacttttatctaagcgagggaaccacaagtgggaagttcagattggaattcttaaaatggaaattgatgagaataatcttgaaaaagtagctaagaaagatcttccacgagaaaaagatgcaaagcggcgaccacgagctgctgtgagaacgacacaaacacgaaagacctcggctcgtcttgatttgcgcggtcatcgctatgaacaagcaatgagtgagctaagtaactttattgatcatgcattgttgaataatctttcaacggtaacaattattcacggaaaagggaccggtgctcttcgtaagggaacacaacaatatttgcaaagcaatccacgagttaaatcattctcctatgcttcccctaatgctggtggggatggggcaacaattgttaatttataattacttactataaaaagtaagcaaactaaatgacatttaagaagtgatttgttagaatagcgttaagaaaaacaaaggaggaattgaatatggctgtaaacgtaactacagatcaaacctttgaacaagatactgccactggtgtcgatttaattgatttttgggcaacttggtgtggtccctgtcggatgcaatcaccagtagttgatgcattatctgataagatgcccgatattaaattttttaagatggatgttgaccaaaatccagaaactgcacaaaaattccggattatgagtatccctacattaatggttaagaaagatggtaaggtagtagaccaaatcattggttaccatagtgaagatcaattaaagcaaattttacaacaatatgttgattagaaaaaagctggagaaaaactttttgttttcttccagctttttcgtattttaaacttattttttatctttttttcgtcgctttagtagggaatgacgagtttcttttttgagggtgtcttctttttcgtcagggcgatcaacagtaatgaatgttaccatctcagatcgttcattatcagctgaactttgtggatcgttttgaatcaaaatatcaacataatcacggtgccagtcaaagatctttgcctctgcaaccgttccaagttgaaactctacttcttgagcaagaaaaccacactctaaaccaaaggaggtttcctcttcgtctctttgaatccgttcctttacaattacccctgataacctccaaacttgagaagtattgctttttttacgtaaagctaaacggccaaagccaagttgattagtgagatatactagatcctcggctgtagcaacaggatatactcgagcgagatctttaccaatccaatatagcatttcatcggtctctttacccaggatagctggtaaaatcacgtcgcgcattgttccagctcctagtccttgatgaccggctattaattgattatataatttctgactcatatccactcgctcctttttaacaatcattattattatacttaaaattcaagatcttaatagggttaaacctgaaaaacttgcaaaatcttatggagaaacggataatatagtttcaaggttttaaacgttttaataaattaacgaggtgaagagaatggataaacgaccaatcggggttatggattcagggttaggcggcctatctgtaattcgtgtacttcgtgaacaactgccccaagaatctgtaatttttgtgggtgaccaagggcattttccatatggaactaaaacaaaagaacagattcagcaattagcattacgcattggaaaattcttgttagaacaagacgtaaaaatgatgataattgcatgcaataccgcgactgcagcagctcttcgacttcttcaaaacgaattaccaattccagtaattggggtaattgaaccaggagccatggctgctacccaacatcattataaaaaaattggggtaattggcactgaatccactattaaaaatggcgcttatgctaaaacattagctaaacttaatcctgatctaagtgttatcagttctcccgcacagccacttgtctcaattgttgagcatgggcaaacaggaacaagtgaggcacaaaaagctgttgacactgaattagaagtatttgataaccaatcgattgaagctttgatccttgggtgtactcatttcccgtttttacaaaaagaaattcataataaattaggatctaatgttcagttaattgatcctgcatttgagacaatcagacaggcaaaggaattgttaactggcaaaaatcagttgagtgataatttagcgtcaagtatcaacctttattcaacgggagatgctaaagacttagttgctggtgcacaacaatggttaccaaacggatacagtaagtgtgcacatattgaattaaacgaggaaggttaaaatgaaaacaatcgtaatcgcaacaaagaatgccgggaaagtgcgtgaataccaagatatgcttgctcccctaggaattgaagtaaaaacattagccgattttgcaccaatagcaattaatgaaaatggtaaaacatttgaagaaaatgcaacaattaaagctactacagctgctaatcaactccaactaccagttatggcagatgattcgggcttaatggttgatgctcttggaggtgctccaggtgtacactcagcaagatatgctggtgatcatgatgatgctgctaataatgctaaactcttattggcgttaaaagaggtaccggatgaaaaaaggactgctcactttcatactaccatcgtcggaattaagcctgatggaaccaaattagttgccaatggtcgggttgatggccatattcttcatcaactcacaggagaaaacggttttggttatgatccgcttttttatgttgatgaattaggcaaatcaatggcccaattaacagcagaccaaaagaatcaaattagtcatcggggacgcgcattacgatcatttatgaagcaatttaatgattggtggtaataaaaatgaaaatactagttgtaagtgataaccatcgagaagaaaaaattttgacagagattgttcaaaaaatgggggatcaagttgacctaatgattcactgtggggattcagaattagctcctgatcaggaaccgatgagcaattttaaggcagtgaaggggaataatgattatggtttgtcgtaccctaatgagttggtaattaatgctgggcaagagcagctctatctaactcatggtcatttacagcgggtcaatttttctctgacccctctgatacttaccggccaagaaaaaggtgcctccattgtgtgctatgggcatactcatcagttaggagccgtttacgatcatcaaatgctaataattaatcctgggagcatcagttttcctcgtggtgaatatgctaaactcgggggaacttttgcaattattgatgcgcagcctgagcggtttattgttgattattataaccgcgagatggaagctgttcctgaattacattgtgaattcagtcgtcagaaataaaggagtgtatttttgtgattgatcagcgtttgcagactttattgctgaaaaataagcagaagtttatgatccctgccagtttagttgcaacagtaaatcaaagcaacagtttagatcatgcatttttagtccttactaaggatcggtacgctaaaattattgtgattgataataaaaaccgttactgtggtcaagtttctttggcgatgattactgaccgattattggagacaaaacggatcaatgtggagcgcttaaatgaattaaaggtcagggatgtgatgcaaaccgatgcgccagttatccaagatccaactgatatcgaagaaaatttacacctcttaattgatcagtcatttttaccggtggtggacgatcataattacttttgcggaattgtgacgcgtcgtgaagtattaaaggcggtcaattatacaatgcatacttttgggaaataatgaaaagtagttatgatataagtcaagttactttcataaaaaataaatagcgcagtacaacataggcctccagcgtccggtaaaaccgaacgttggaggcctccttctttttatcattcatttttaattaactgattaatagtctgcaagacgccatcatgattattatcaattgttgtggtatgggcagcttgcatttgaataattggttgagcattttgcattgcgtaactttgactcgtcattgctaacatcccgaggtcattttcattgtcaccaaacgtaacaatttcatttgcctttaaattaaagtgagactgtaaaagagaaagagcgttttgtttagttgcagcagcattaccgattaagtcagtattaaagcctgaattttccatgattaaggatggtggtaagtaaccatctaaggttgttgcaactttttttagatcgatatggttagcaaaattaatcgatatcttggtaaaatcttcagttggccgttgagtgaaaatttgtcggatatcagggatacgctctacattttcataaaaaagtttcacaatattgaaatcatgagcactcatcccctgatcaacataagatttttcactagtagagattactaattgattaatatcttgtggaccatagaaacggtcaaggacatgaataacccgggctaaagattcttgattaataggaaaagatttaaataatttgcttcctaaatgaataactgaaccgttttgcgaaataaatcccatcttggcggtgtagtctttaaattctcgttgcaaacgtggaaagctggatccactagcagcgacaaagtagatattatggcgttcaagttggcgaaagacctttgcaaataaagaatgattgtaagtatggtcatctcgtaaaaaggttccgtccatatcagtagcgattaatttaatactcattaggtactccctcccaggcaattggaatattatttgttcgtaattctttaagatatgctgccaaaaagcgactagcaacagttgattgttttccgctgactgctgttatcgtcacacgaaaaacgagcgcaccgtctggggtaacgactggtccgacaataactggttttaattgtagtgcctttatttgtggaactagttttttattaacttgcgtaacaatttcttctaccttactaagaggggtcttcgaagtaatccgaatatcaacgttgctaaccatattatttcgtgaaaggttttgaacaatagtaatgttacggttaggaataaaattaagtgttccgtcagaactagtaacttgtgtagtacgaataccaagagcagttactgttcctttgatttgcccaatttggacagtgtcgccaacgtctaattgttgctcaaggaggatgaaaaatccagtcacgatatcactaacaaggctttgcgcaccaagccccaatgctaaactaaagattccggctccggcaatcagtgtccctactggaacgccaatttctgatagtatggcgtataataagaaaaaataacaagtataacgataaatatttaagacaagggcttttaccgttgccatccgattgctattttttagtacattgtatttttttgattcttgaaaaagatggacaatgataactcgtcctacccataaaagtattaaaaataagacaaacgtaacgataattaaaagaaatttacttaaaagctgttgtgaaatttcgtgccaggataaatctgtaaaagctttttttaattgttccgtttgttttgatgtaagtgaagtggcaccagtgatcataataacctcctaaaaaatactaataaatattttaacagggaagacaagcttctgtcgactacactagattatcgtttttatttgttttatgatattcttagcattgaataaatattttgaaaactaaaggagggattatcagatgacttttggccagttggcagggttaattgcggcaatcgcattcttaatcttagtcatttttgcatgtatcctgttgaatcaattgagtaagacaatgaaagaaacaaataaaagtattacaactttaacgcgggatgttcattatcttagccaagaaatggaggacgtgctaagtaacacgaatacattgttagacgatattaaccataaatcagaacaactagatccggcggttaaagcggttgcagatgtaagtcagagtgtttcggaagtgaatgcctcacttcaagaaatggtcgagaaagcccggttgcaccgcgagaagcgacaatttgaccggagtatttttaaatttgcaggaaagacacttgttttcgatgctttcaacaaatttagacagcatcggaagcaaaagaaaggaatgacaaataatgagtaaaaaattacttgctgggatattattaggtggagtcgcaacatatgctgcatggaagaaaatggcgccggctaaaaaagaggcattgaaagaaagcgttgatgaaaagattaataaggttgctgattatgtgactgactataccttagacgcattagacattgtcgatgaccttatgagtgattctaacttgaatgataaggtgagcggcgctgcgggtgctgttaataatgttaagggtaagataaaagatagcgccaataaagtagttaatcatatgactaatgatgactttgataagcaaactgctgatattcgtgaggaattagcgaagaataaagaaacagatgaagataataacgatattattatcgatgctactagtgatcaaaagccagcatctactgaagacgatgaaacagatcaagatgacgctaatgcagccgataaataagtaaataaaaaagctgagaggtttctcagcttttttattttaatgagggaaagttagtaattctttagttgtatgcgtaaatggttcgcaaccatcttctgtaatatgaacacagtcttcaatccggacgccggcaaaacctggaatataaatgccaggttcaatggagaagcacattccaggttcaaaaactagctgatttccttccatgattgatggaaattcgtgttcactgctacccattccgtgcccgaggcggtgaataaagtattcgccataaccagctacagtaatgatatcacgagcgatcttatctaattcttcagcggtcattcccggcttcgcagcattttgagcggccaattgagcctctaaacataccttgtagatgtctttttgtttgtcatttaactttccgacagccactgttcgggaagcatcgctaatatagccatcaacaattgttcctaagtcaaagaggacgagctgattattttggatcttattactggaggtagctccatgaggttcggcagcatgaggacctgcttgaactagcgtatcaaaactcattttattaatcccatgttgtttaagagcgtattctaaatcggcagcaacttcttgttctgttttaccaatttgaattgcttcgaatcctactttaaaagcgaaatcagcccatttccctgcttcatttaacttagtaatctcatcatcgcttttaatcattcgcatttttgctattaaaggagagagatcagtattaaaatgggcattggggaggacttcttctaaggcacgaagacggtcaacagttagtgattctccctcaattccccagttaattggtgaaccagcatgatttttgatatgttcagcaataagctcaaaaggtttttcgtgatctaaatacccatataccggatatttccaaccagtatcctttattgcttctacttcaagcgctggtgcaaacagaaatggctcactgtcggcaaaaaggactagtgctaatacccgttctactggatcgctgtagaaactagttaggtaattaatggtcattggatcactaatataagcagcatctaatcccttttcagtaagagcgctttgtaattgattaagttttgtcactgcattcacttcctaaaaaagattgcgaatattataacatattgttatgacccgaaagtaaaaaaataatgaagaacgtttgctaattaaaactaaatctgctatattaactaggttatgaaaaaatatgaaaacagattataccaataaagaaagggctatcttatggaaaaacaatcagtaacaatttatacggttgcccgagaagctcgtgtctcaatggccactgtttcacgagtagtaaatggcaatccaaatgtaaaaccagaaactagacaaaaagttttagatgtaattaagcagcttaattatcgtcctaatgcagttgcacggggattagcttctaaaaagacaacgactgttggggtagttattcctaatataactgatccatactttgcggaattagcattggggattgatgatgttgcttcaatgtataagtacaatatcattttaactaattctgattctgatgatgaaaagatcctgaaagtggtgcggagcttgcttgctaaacaggttgatggacttatctttatgggtcatgatgtttctgatgatctgcgaaatgaatttgaaagcacaaatacaccagttgtagtagctggttctgttgttaatgatgatgctttaccaagcgttcggattaactaccaagcagccgccaaggaagcgacagaatttctgctaaaacatggtgatcaacaagttgcctatattactggtccattacgatactcaattaatggcgaagaccggctcaatggatataaagaagcattggcaaataataatgtgccatttaatgaattattagtaattgaaacggacgggtcttatcaggctggatatgcaaaggcacaagaagttatcgaaaagggattaaaggctgcttatgtaacagatgatagtttagctgctggtctcttaaacgggcttacggatgctgatattagcgttccagatgattttgaactaatttcttctaatgacaccaattatacaaaggttgtccggccaacaatcacttcgatcactcaacctctttatgatcttggtgccatttcaatgcggttgttgacaaaattaatggatggcgatgacagcaatgatgatgaaaaaaatgttattttagatcatggctttgttgaacgccaatcaactcgtaagtaggttgtgatttgttgtgacaacccgaagtgaattacgagcacaacgacaagaaaaagttgagaagccaatagaagaaacaccgaaaaagcatcattttctatactgcttatggggtgtaatctgtgtgactttactcgggctaacattactaattaattcgacacttttaaatgttaactttgtaaaagaagaagttacaaattcgtcgcttgaatcagttatgttaaaccaggttaacagtagtctaattcagtacgggatttcaacttctatcttaaagaaaagcgatactgataagctaattaaccaggcaattgatcaggtatatgcaggtgaaaaaattaatcttgacctatcacctatagttaataatgtgggcgcatctgttaattcccaattagctcaatatggtttgtctacttccatgttaccagcaggcagttcttcagcaattgctggtaacattaattcgatggttaacagtcagttaaatgctcccgaagttgcacagttaattaatgggattaaaattgctaaaacggttgttaatattattttagtgatttcaattatcagcctcgttatattgattcttaaggggttatggcagcatcacttaattggtagttttaggtggatttgtctgtggggaactattttatacacaggaatcgttatgactattcatgcgattgcccttcaaatgggtgcaggccaaccagacataagtccctttatttcccaggttgctaatgattttcagcagactggatttcacggttcaatgatgatgattgtcattagtattgtgttatttattctgcactttgtaaaacgaaaatggcaacctcgccaataaccttgaattaacgatgaatatttgctaaaatttatctgtttgtattacactaataaagaaaagaggagtcagtaatgtcaggacattcaaaatggcataacattcagggacgtaagaacgcccaagatgctaagcgtggtaagattttccaaaagatttcacgtgacttataccaagcagctaaagcaggtgatcctgatccagcgaacaacgctcaattacggcttgtaatcgataaggcacacgcggccaacatgcctaagaaaaatattgaccgtgctattgctaaagcttcaggtattggtggagctaagttcgaagaagttacttatgaaggttatggaccaggtggggtagcagtaatggtttctgctcttactgataacaagaaccggactgcatctgctgttcgttcagcatttagtcactctggcggttcattaggtgctagtggatcagtttcatacatgttcgaccgtaagggattaatcgaaattctccgtgatggtcttgataagagcgaagatgatatgttaatggatgctttagatgctggagctgaagatatgaaggcaactgaagaaaagttccaaatcttcacagatccaagtagcatgacagatgttcgtgatgctcttcaagaacaaggctacgaattagatactgctgaagttaccatgatccctcaaaaccggacagaggtacctgcagataaggcaaagcaataccgtcatttgattgatgaattaacagaaaacgatgatgttgctgatatttacgaaactggtattttaccagacgaagatgacgatgaagaataattcaatcattgttattaagaggttaaaaagcaaaacgctttttaacctcttttttagttttaaattttttagtgcatttttagaatttatccgtatttaaataatagggaggttaaaatatgccgagttttgaagaagaattagcaagaatgattcgcaagcaaccgagtgacctatatatcttacctcatgataggtattatcaattatccttagcgataagggggaccctattaccttttaaacaggttacgcgtgactatggtcaacgttttatctcatacttaaaatattgcgccaatatggcagttagtgagcatcgacgaccccagctaggcgcttttaaatttacttatgctcaccaaaagatcaatttacgcttatcaagtgttggtgattatcaagggagggaatcactagttattcgctttatatatcctcttaatgatattaggtttaattttttagttcctcatcagtgggaaagattacagaaataccgtcaacaacgaggtttaattctttttgccgggccaatgggggctggtaaaacaactaccatgtatcagcttgctcgacagctattgccgaaacaaattgtattaacaattgaagaccccgtagaaattgatcatccgggatttattcaattgcaagtaaatgaattagcggggatgaactatgaaagtttattaaaattgggattacggcatcgcccagatgtatttatcattggagaaattcgtgattcacagacagcagctatgtctgtccaggccgcattaagtggtcacttagttttgggaactatccatgctcgaaatgcttatggcgttgtttctcgccttcaacaattagggatagattcttattaccttcagcaagtattaacggcagtatcttatcagcgtttaattccgttggtgaatggagaacaagccatcttatgtgacctgttaaatcgacatcaatttagtggtttgcttagtggcaccaagaaaggaggaatatctgatgaatggtcaaaagctcttcagcaggctgtggaaaatggcgaaattacggagaatactgcacgtcaataccaacaaggttaaattcaatcatcagcaacaagcagattttttccttttattagcagatttattaagtgttggcttttctgtcaaagaagcacttggttttatcaaggctgtcaatccgaagctaggtccttggattgcttctatagataaacgaatgcaaaagggagcgagttttgcccagagcctgcagtcagaagtaaaagacgatttgttttatcaattactattagcagaaaagcatggtaatttaacaaaaacattgagtgaagtaggaaagatacttacagcacgagaacagcaacgaaaaaaattatttagtctcctgcaatatccgctaattcttttagggatgctaggggtggtgatttgtgggttaattttgtttgtttttccagaattgaaagtctggcaaggcgagaggcaaactttgccgctaattcacatgattacgttaggagcaacgtatctttttaccgttatctttattagcgctgtatttcaggggctaagatggcatcaaatgaataaggaacaacggctaattaagatctgtacaataccgatgatcggaaaatgctattgttattattttcaatattatttaactagtatattaggatcaatgttgcaacaaggattatcgttggctgaaatttgtgaaattacccagagctttgatagaaaatcaattctttatatttttggtaacaaaataatgactactattcaacatgatggagatatttcaaaagtggtggctacctactcttttcttcctaatgaattaattgtttttatgaataagggggcgaccagggaaaatatgggacgggacttaattgttttcgcgaatttaaaatttaaggcccttacaactgcaattgaacatttattgatttttgttcaaccagttatctttagcattattgcaatcataattgttattttatatcttagtatcttattgccaatctgtcattcattccaaggagtttattaatgaaaattttaaagaaaaaacaatcaggcttcaccttgctcgaaatgtcaatcgtcttatttattattagcctactagtattgattatgctgcccaatctctctcaacagcgaaagcatgctaatagtattcatggaaaagcgatgacatctgtaattcagacccaaattgatgcatatgaaaatgaaaatggaactgataatgtcagtttagaggaattgaataaagcaaattatctgactgatgcgcaggttcaacaggcccatcacgaaaaaattgtaattgttgatgggaaggcaattcagcgatgaattttcgtgaagaagggtttacgtttctcgaagcaattattgttttaggaataacggccctccttttactaattacgattccaaattttacaaaaacgcgtcaaaaactagctgaagaacaattttggcaatcattgcgtcaagattggcagtgggcgcaattaaagtgtgagagtaaacatcaatttgttgtaattcgccacgacaaaaataacgaaatgattacttttcgtataaatgatcaaacgagagagacaaaagaaatccttattccctcaacactgaatgttgagtggtttggtgaactttatcttacgccaaatggctatacgcgcccctgtacccagcgttttaaatcattaatcgatggtcactattactacatgaagattcaattaggatggggaggataccgaattgagaaacgctaaagtaaaagcatttatgatggcagatagtttaattagtttatttattgtagcgatggggataaatttattttttatttgcgaaaaacaattgtggttacaaaatagaaatcttcagctaaaaatggccgcaacgaggttaggaaaagaggctagtgatttatatgcggttaaaaagcaatcagttattttaagccgtggtgatttaaccgcaaaagcaacggtccaaagggtggttgtttataataataatcgatgcctttgtcgggttgaaagatgaagaagggggcctttactttaatagaagcgacttacgcgttaattatttcttcattagtgattatcaatataagtttagttactactagcatgagacaagtaggtaaaatgaacttagaatcaacgatcacttggcatttgtttttacgggaattagaatcagtcaatcatcgttttgaattaatggaggttcgtgataattggttattactgtacagtcagacaactgatcaaaagtatgaattaagagaaaaccatgctctatacctaacgtgtcagaataaaggtggttatatgccattgttagatagcattaagaatcatgaatactcgtttacgcaacttgattcccaacgcgtattgattaaggtgacaaggaaggatggagagaaagcaagtgcaattgttaagttttatccaccaaaataaaaaagagggttctattttatttgtaagtattgccgtcctacttataattagttcaattttattgtttcaatatcgatattatcaaaattatcaggaaatgggacgagatctttgttcaatttatattgataaaataaaagataatctaagaggtcaatgagagtgttatcttgaatttgctaggaataatagttaaactaataaggtaatgattgtattatttggaggcgactagcactgacacagaaaacaccacagcaattatttgagctttttgataaggccactgaaattttacaagcagcgttaaattgttcgtatttagatgcgctattagaaaacgcagaaaatattattgacaataatactgttcgtgttgatgaaggtgttcctgatgaaaaaactgtaaatgaattgcagaaaatataccaagaattaaatttacaaaatgtgaagccagaaattatccgacaaattatccagctgagttttttgaaagtaattcgaaaagatgcaattcaggctaatcatcaaatgactcctgatacaattggcttaatcatggctttcttaattgaaaaggttacaaaaatcaaggagattaagactgtttttgatccagccgttgggacagctaatttattaacgactgtgatgaatcagcttaaagtaaatggagataaagacatcgttggttacggaatagataatgacgaagatatgttgggagttgcgagtgtaaatacagaattacaacaccttaatgtaaagttgtaccatcaagatgctgtaactgctttagatatttctcaatgtgatttagctatttctgatttgccaattggttactatccgcttgatgaaaacgccaaaaactatcaaacacgggctaaagagggtcattcatatgttcaccatttgttgattgaacaatctatgaattatcttaagcccggtgcatttggggtattcttagtgcctagtagcttattccaaactaaagaatcacaatcatttgttaaatggattcagtctgttgcctatttacaaggacttatcaatttgccagcagaactttttgctaatccgaatgcgcaaaaatcaattttgttattgcagcgccaaggtggagatagcaaacaagcagttaaagttttgttgggtgagtttccttcatttaaggataaagcaaaatttgcttcattcatggatgatatcagtaaatgggtaacaacgaatttacgttaaaggagaaaagtcaatgtcaaaaacaattgcagttaacgctggtagttcaacacttaaattcaaattatttgatatgccaagtgaagaggtagtagctgaaggtacgattgaacgtattggtgaaaagatgggccatgctaagattaagtatggtaatggtcaaaagcatgaagaagataagccatttgttgatcatgctgccgcagttaattatttgttagataagttaattgaattaaagattgtggcaagctatgatgaaatcacagcagtaggtcaccgaattgttgccggtggagaattctttaaggattcaacaattattgatgatgatgttattagcaagattgatgaattgtcagaatatgctccactccatgagccggcagaattggttggtattaaagctttccgtaaagtattacctaatgcatttgcggttgctgtttttgatacatcattccatgttgatatgccagaaatgaatgcattgtacagtgtgccttatgattggtatgagaagtatggtgcgcgtaagtatggtgctcacggtaccagtcaccgttacgtatctgcacgtgctgcggaaatgttaggcaagccagttgaagaacttaaattaatcaccatgcatattggagcaggtgcatcaatcactgccgtaaagaatggtaagtcattcgatacgtcaatgggctttacgcctgttgctggaataacaatggcaactcggtcaggggatgttgatccatccttaattgcttttatgcagggtaaactaaacttatcctcagatgagatgattgatattttgaaccataagtctggtttgcttggtatttctggtatctccccagatatgcgtgatattcttgcagctgctgaaaagggtgacgaccgagcacaacttgcattagatatttatgttaaccgcattgtccgttacattggagcatatattgctgaaatgggtggcgcagatgccattgtcttcactgccggtgttggtgaaaacagtgttccagtacgaaagatgatcacagataagcttgactactttggcattaagattgatcaagaaaagaacgactgccatggtgttgaacgtgatctttctgctgatgatgcaaagattaagacattattaattccaactaacgaagaattaatgattgttcgtgatattgaacgtttaaagaaaaataactaagtactaaataattcgccaaaagctgactagttgacaagaaatgtttgtctctagtctctttttattttagaatttaagataactatattgcctttttaagaaagaagattctctatgaagttttgcacgtcagatactcatttttttcatgatagtctccttggtacaaataaatttgcaccaaggccattcaataatgtcaatgagatgaaccaaacgattattaataattggaacgataaggttggtgaaaatgatattgtttatcatttaggagacattgctctgtactttactaaacctcaacgaaatgcctatcaagcaatccttgaggtgttattacaattacatggacacttaatactgataaaaggcaatcatgataatcgggccctttttaaatatctagaaagtaataattatgagtttaatggacttcctaaatttcagtttcatgatgtgggagtactattaaaatataatcaccgtcagtattatttaactcattatcctcttatgttaggaatagcaccgcaaattattaaccttcatggccatattcaccactattctgttcccattaaagaaaatataaatgtaggcgtggatgctcccgaattagactatcttgaaaataagcctaaatttggagctccgctgaattttcatgaaatagaagaaatcgtagcgcaaaaagctatgaagtatccaggacaaaaataatcaaaagaaggtggaaaagatgaatagagctaagattcaagattatattgatcagcgtgaagagcaacgatctttaatctatcatattgaaaaaaaagaccagacacattttaccgttaatggacatccttacgaattagtaaaggactaccgtgacggttttaattcagaaaaattcgcagaacgatttagcagtgttctgagtaaatatgactatatcgttggggattggggatatgaccaattacgcttaaaaggtttttataatgatgataatcccttatttgaaccagaattgggtgctgatacgattgaggattatttatttgagtattgtaattttggctgtgcgtattttatccttcacaatgatgatgtttgtattccacggcacagttaccgtcagcgtcgaaagaaaactacgccagtcattcatgaacggcgacggcaggttaaacaaccgaacgtgcgtcaacggcataatcagcgtgcagaacgtgtaaaaaacggtcatcggcaaaaatttgtgattcatcaacgaaaaaagaggagctaaggcaaacgatgaaagattatcaaggatattttattgatttagatgggacgacttataagggcaaaaagcaaattccagcagccggaagatttatcaaacgactacaagatgtcaagaaagaggtcttgtttgtaacaaataatagtaccagaacgccagattttgtcgctgaaaacctccgtgaaaatcataatattaatgttacggcggaaaatatatacacaacagcaatcgcaactgctgactatttacggtcaatggcgccgataaaaagtaaaatttatgttattggtgagtcaggattaaagttggctttagaaaagcgagggtttatcttgactgatgatcaacctgaatatgttgttgtaggattagatacgaatgttacttatgagaagcttgaaaaggcagtcttgttaattcgaaatggcgctaaatttattgggaccaatgctgatagtaatttgcctaatgaacgagggatggttcctggagcaggttcgattgtaaagctagtagaatatgcaactcaagtgaaacctgtgatgattggtaaaccagaagcaataattatgaaaatggcacttgaaagagttaaattgcctaaagaaagggtaattatggtcggcgataactatcatactgatattgaagcagcaattaatgttggaatggatagtttattagtttatactggtttatcgcgtccagaagaagttataaaagaaaaaatccagccaacatataaggtgaataatcttgatgaatgggaaatttgaatttattcagtggggaagagcaatcttattgacactacttagtttagttgttgcaattagtattgctctttttatcgttattaatatctcacctttttttataacaattcctaagcacctcctaggattatctgcctctgaattaatagctgattatggaagtgtcattaaatatatccagcttccggcccagcgagtcctcgaactaagatatttaccaattgccccttctgcagttcaccattttgaagacgtaaaacatttgattttattgaatgaagctgtgatggtggtttcgctcccgttgttagtgtttggattgaaaaaacaaaaacggcaaaatcagctctggcgcctgattttaccgtttcagatgttatttattttattgctctttagtgggtttatggggataacaaatttcgatgtcctttttattaaatttcattatcttttctttagcaatatggattggctatttgatccacgaacaacgccaatcatattgttgatgcctgaaaatttttttacagtactatttggattatggttaggatttatattgataatcttacttttgatctggggatggataaagcttatgttaagcatcttctttaacaaaacgcgaacgtaatgctccgacaacggctgggattaacgtaaccacaataattgcaagaatgatgacagagaagtgttcttgaacaaacggaagattaccgaagaagtaaccacatccacaacaaagtgctacccagataacacagccaattacactataacgaataaattgcttgtaggggaaaccagaacctgctgccgcaaatggagcaaatgttctgatgatcggaataaaacgggcgagaataatagccggcgcaccatgcttttcaaagaagacttcggcacgttctagactatctttatcaattaatttaccaaaaagtgagtggttagaaaggctcttcccaatcttatgaccaattaaaaagttaagggagtctccacccaaacaggcgcataagaaaataaaaataaaaatccaaatattaagatgataacgtgggtcagcagctagtgcacttgcagcaaagagaagggaatctccaggtagaaatggcattatgactgcaccagtttcaataaatataatagcgaataaaattaaataagttgcatcgccgaattgattaacaatctgaattagatgaacatcaatgtgtaatataaaatcaataagagttgccaaagtaattctcctttgtgtaataagataatactgttaaagtgtagcaagatagaaaaatgttgtgaaggggcgtttaaaacttttaataatttttgaaaaatatatttattgtaagtataaattagttgtgtgagactagttcattcatagtcaatgacgaaaggatcattgcaccctttttgaaaaggctgaataacgtttattatcataagaatggtaaagcaaacgaaaaaaataaataaaaatcaaaaaaagtgttgacgagggagtgaaatccatgtatagtagttatcgttgtcaaagcagttaagtgctgttgagatggttaacaaaaagttaaaaataattgttgacatctacttgatgacatgatatattaataaagttgctgattgagttatcaatcaaaagaaattcaaaattaattaaaatttcttcttgacaagctaatctaatatatgttataataaccatgttgattggctgcttgattggccaacaggtagacctttgaaaactgaacaaagtttcgacgaatcaaatgtgtagggtcttcaatcacgatgtgatttgaagcaaaacatttgcgaagtcaattcgcttaacaataaagataattgagagctattcaagttcttatatattttatatgagagtttgatcctggctcaggatgaacgccggcggtgtgcctaatacatgcaagtcgtacgcactggcccaactgattgatggtgcttgcacctgattgatgatggatcaccagtgagtggcgaacgggtgagtaacacgtaggtaacctgccccggagcgggggataacatttggaaacagatgctaataccgcataacaacaaaagccacatggcttttgtttgaaagatggctttggctatcactctgggatggacctgcggtgcattagctagttggtaaggcaacggcttaccaaggcgatgatgcatagccgagttgagagactgatcggccacaatggaactgagacacggtccatactcctacgggaggcagcagtagggaatcttccacaatgggcgcaagcctgatggagcaacaccgcgtgagtgaagaagggtttcggctcgtaaagctctgttgttggagaagaacgtgcgtgagagtaactgttcacgcagtgacggtatccaaccagaaagtcacggctaactacgtgccagcagccgcggtaatacgtaggtggcaagcgttatccggatttattgggcgtaaagcgagcgcaggcggttacttaggtctgatgtgaaagccttcggcttaaccgaagaagtgcatcggaaaccgggcgacttgagtgcagaagaggacagtggaactccatgtgtagcggtggaatgcgtagatatatggaagaacaccagtggcgaaggcggctgtctggtctgcaactgacgctgaggctcgaaagcatgggtagcgaacaggattagataccctggtagtccatgccgtaaacgatgagtgctaggtgttggagggtttccgcccttcagtgccggagctaacgcattaagcactccgcctggggagtacgaccgcaaggttgaaactcaaaggaattgacggggcccgcacaagcggtggagcatgtggtttaattcgaagctacgcgaagaaccttaccaggtcttgacatcttgcgctaaccttagagataaggcgttcccttcggggacgtaatgacaggtggtgcatggtcgtcgtcagctcgtgtcgtgagatgttgggttaagtcccgcaacgagcgcaacccttgttactagttgccagcattaagttgggcactctagtgagactgccggtgacaaaccggaggaaggtggggacgacgtcagatcatcatgccccttatgacctgggctacacacgtgctacaatggacggtacaacgagtcgcaagctcgcgagagtaagctaatctcttaaagccgttctcagttcggactgtaggctgcaactcgcctacacgaagtcggaatcgctagtaatcgcggatcagcatgccgcggtgaatacgttcccgggccttgtacacaccgcccgtcacaccatgggagtttgtaacgcccaaagtcggtggcctaacctttatggagggagccgcctaaggcgggacagatgactggggtgaagtcgtaacaaggtagccgtaggagaacctgcggctggatcacctcctttctaaggaataaaacggaacctacacatcggagaaactttgtttagttttgagaggtttacctcttaaaactttaacctataagacgcttatttgggcctatagctcagctggtttagagcgcacgcctgataagcgtgaggtcgatggttcaagtccatttaggcccatatggggaattagctcagctgggagagcacctgctttgcaagcaggaggtcatcggttcgattccgttattctccattatcaaccataaggttgatagagtttgtactttgaaaactaaatactatctaatttctttattaacaaaacaataaaccgagaacaccgcgttatttgagttttaattaacgaattataatcgctaactcaattaatcagacaatctttgattgtttaggttaagttatgaagggcgcatggtgaatgccttggtactaggagccgatgaaggacgggactaacaccgatatgcttcggggagcggtaagtacgctttgatccggagatttccgaatggggcaacccaatcagcttagtcgctgattacttgactagtgaatacatagctagcaagaggtagacgcagtgaactgaaacatcttagtagctgcaggaagagaagaaacatcgattccctgagtagcggcgagcgaaaagggaagagcccaaaccaacaagcttgcttgttggggttgtaggactgaacattagagttaccaaagtgcgacgtagtcgcaacagttgggaagctgtgccatagagggtgaaagccccgtagacgaaacgtcacactctctgttcaggatcctgagtacggcgggacacgtgaaaccccgtcggaacccgcgaggaccatctcgcaaggctaaatactccctagtgaccgatagtgaaccagtaccgtgagggaaaggtgaaaagcaccccggaaggggagtgaaatagttcctgaaaccatgtgcctacaagctgtcggagcccgttaatgggtgacggcgtgcctcttgcagaatgaaccggcgagttacgattgcatgcaaggttaaggtggaaaaaccggagccgtagcgaaagcgagtcttaaatggacgtaaaaagtatgtagttgtagacccgaaaccaggtgacctacccatgtccaggttgaaggtgcggtaaagcgcactggaggaccgaacccgtgtcagttgaaaatggctgggatgaggtgtgggtagcggtgaaattccaaacgaacttggagatagctggttctctccgaaatctctttagggggagccttgaggtaaagaatcgtggaggtagagctactgtttggacaaggggctcgtcatgggttaccaacttcagataaactccgaatgccatcgatttatactcaggagtcagacgatgagtgataagatccaccgtcgaaaggggaacagcccagatcaccagttaaggtccctaaatatatgctaagtggaaaaggatgtggagttgcatagacaactaggatgttggcttagaagcagccaccatttaaagagtgcgtaatagctcactagtcgagtgatcctgcgccgaaaatgtaccggggctaagcatattaccgaaactgtggatgtgcactatgtgcacgtgataggagagcgttctaagggcggcgaagtcagaccgtgaggactggtggagcgcttagaagtgagaatgccggtatgagtagcgaaagacaggtgagaatcctgtccaccgaatgactaaggtttcctggggaaggctcgtcctcccagggtaagtcgggacctaagccgaggccgagaggcgtaggcgatggataacaggttgagattcctgtaccagttaactgcgtttgacgatggagggacgcaggaggctaagcaaaccgtacgactggaagagtacggccaagcagtaagtcaggatgtgagtcaaatgtttacatccgtgttgacaagctgtgatggggagcgaaattaaagtagcgaagttgccgatgtcacactgccgagaaaagcttctaaggagtagttaactgcccgtaccgcaaaccgacacaggtagtcgaggagagaatcctaaggtgagcgagagaactctcgttaaggaactcggcaaaatgaccccgtaacttcgggagaaggggtgctggccgcaaggccagccgcagtgaataggcccaggcgactgtttatcaaaaacacaggtttctgcaaaatcgtaagatgaagtataggggctgacgcctgcccggtgctggaaggttaaaaggatgggttagcttcggcgaagctcagaattgaagccccagtaaacggcggccgtaactataacggtcctaaggtagcgaaattccttgtcgggtaagttccgacccgcacgaaaggcgtaacgatctgggcgctgtctcaacgagagactcggtgaaattgaaatccctgtgaagatgcagggtacccgcgacaggacggaaagaccccatggagctttactgtagcttgatattgagtgtttgtactgcttgtacaggataggtaggagccgtagaagtcgggacgctagtttcgacagaggcgctggtgggatactacccttgcaatatgaccactctaacccgcagcactgaacgtgctgggagacagtgtcaggtgggcagtttgactggggcggtcgcctcctaaaaggtaacggaggcgcccaaaggttcgctcagtatggttggaaatcatgcgcagagtgtaaaggcacaagcgagcttgactgcgagacagacaggtcgagcagggacgaaagtcgggcttagtgatccggtggttccgtatggaagggccatcgctcaacggataaaagctaccctggggataacaggcttatctcccccaagagtccacatcgacggggaggtttggcacctcgatgtcggctcatcgcatcctggggctgtagtcggtcccaagggttgggctgttcgcccattaaagcggtacgcgagctgggttcagaacgtcgtgagacagttcggtccctatccgtcgcgggcgtaggaaatttgagaggacctgtccttagtacgagaggaccgggatggacataccgctggtgtaccagttgttccgccaggagcaccgctgggtagctatgtatggacgagataaacgctgaaagcatctaagtgtgaaactcgcctcgagatgagatttcccatttccttcgggaaagtaagacccctcagagatgatgaggtagataggatggaagtggaagtgccgtgaggcatggagcggaccattactaatcggtcgaggacttaaccaaggagcggtaaggtttattggaagagaatagataggatttagttttgagagcacaagctctcgtccgaagggacaaagagtgtggtgatgatggcttgaaggatacacctgtacccatgccgaacacagaagttaagcttcaacacgccgaaagtagttgggggatcgctccctgcgaggataggacgttgccacgcaaaatcaagctttggcacctggtcttaattgtgccagggcttggatattggagagttgtccgagctggccgaaggagcatcattggaaatgatgtatacgggttaaagcctgtatcaagggttcgaatcccttactctccgttaatatgacccgttagtcaagtggttaagacaccagcctttcacgctggtatcgtgggttcaaatcccgcacgggtcacttttggaggattagctcagttgggagagcatctgccttacaagcagggggtcacaggttcgagccctgtatcctccattacaacttaatagttgtatatacccatgacacaatggctcggtagctcagttggtagagcaacggattgaagctccgtgtgtcggcggttcgattccgtcccgcgccatttatggggagtagcgaagtctggctaaacgcgacggtctgtaaaaccgttccttcgggttcggtggttcgaatccactctcccccattttatagggatatagttaaacggtataactacggtctccaaaaccgtcattgtgggttcgattcctactatccctgcttaactgaatattttggcggtattggtgaagtttggttaacacaccggtttgtgggtccggcacgcgtgggttcgaatcccacataccgcccttttgattaagcttattacttaatcttaactatttggtggtatagccaagtggtaaggcagaggtctgcaaaacctttatcatcggttcaaatccgattaccaccttttagttagctgatgcctctgtggcggaattggcagacgcgctggactcaaaatccagttcccgttgagggagtgtgggttcgacccccaccggaggcatattagtactttggtacaaaattgtcagctaagctaatgaaataggagaaagcttgttattgcaggctttctcctattttttagtttaaattttgattttaaagaaatggtataaaatggtgcaaatttgtgatgaaaacacacaaaaatcacacattaaaattgactaagtgcctggacgattttgtcatcagttttacttttatattcatcaatcaagtaggcgtatgtgttcattgtggttgtgatatcattatgtccaagtctcttgctaattgcataaatatctattccgttacttaacagtaaagcaacgtgactatgacgtaaactatggaaatgaaaattcttctttgataattttgtatcactcataatttgtcgaagcgttttatttaatgctgtactagtagggatagtattaaattgatccataaaaacaaggttacttgatgaattattgcgcaattgtttaagtagtaatagtagtttttcattaacttttattttacgtgtagatgattcattcttggtgggtttaaagcgatgtgtattaaaatgttcgtctgtttcgtctcttccttttacctctctccatgctttatcaatattaatggtatgatgaatgaaatcaatatcattccaggtaagagcttgaatttcttcttttctcattccagtatatatcgcagtgactatcatataacggcttgtatatcttctattagtaattccattgattgtagtagttaataatttccttatttcagttacattagggtattctaccttcattgttttgctagtattggcagctaaagtaacacctttagtaaaatctttaagcagataatcatcaaggatagcagattgtacgcaagaccgtattattgaattaagcttctttacacttgctatagcatgagttgctccatacttgttaataaattcttgatatttagaacggttaatttctttaatagaagcttctttgaaataatcattaattagattaccgattataatataacgattcagagttacacttgatattttaggttgcttataagtattaacccattcttcgtaataatcactaaaagcaatttttttctcaatgtgtattccgcgattaagattagtttccatttcagctgcccactttttagctagtgcttttgttgcaaaaccagctttggactttgaaaaacgttttccttcagtatctttccactgaattcttacagaccattttccgcttcttttatatatttgagccatacttgtccctccattattaaattgtgtataatgaaagggttgatagaatttgtttggacgcaattaatatcaacccttggtccactgacagttgccgctgtcggtgggcttttttagtttaaatagctttttacgtcatcaatttagttggacgagaaatttagcttttgtttagcttctttaattgattaataatttcttgattttgcttaattgttatccaattttgctgtttgattattcttaattcatgaaaaagggcttttgtatcattacttgtaaaagtaggataggcacctgttaatttttcggcaactgctatatcttttacagattcgagaatttcgtcatctaaactttctaaacgattttctttaatatatttatctttgtctttagcaaatccatctttaccattgaaaatactcatttttagctttctcctatctttttaatttttacattgtaaagagcgttatttaaatcattacagttcctaagataggaaaaagcgttttttaaaagtttattcatcctttgactccttatattcctaaaatttgtttctttttagcatcaaattcttctttgttaatgattccatcatcaagtagttgttttaattctcttaattgcgaaaggtcattactagaattggattgtgctgatgtctgcttaaaatctgcagctgcctgtttaatagtctcagccatctttttagcagggtagggttgcatattttctatttgagttgtaatagctccgttggttactgcaatagatcccaacattaaacctttagaatatgaaacgccattaatcatatcaaggggaatgtcagttgatttactaccataaatcaggccgtggtcaagaaaaattacgcgcttattagtacaaaccgcaagaatggaattagtttcaacgaaagcattagcagcataaagtattttttctccaccatcgacatctattatgtctggcaaggctttgatttcctttttagtaccgaatagattttctacattggcatcctttaactgttgcttaataacatccaatttttcttgttcgcctttgttgatttcgtcaattgctgcttgtaaagtatcagcttttttaccagcgctatcagcaattgaatcaagtttctcagttactttagatagctttgatttatacaaatcaggatgttctttgtaaggtacggtagaatgaatccctaataaactttcaatttcactagcggtatgggaactaatgaaattgctaagtttaattggaacacggtaagtatttgctggacgtttgggatcaagtctgttggcatctttgccacaaattaaatatccatctttggtaatgcaagaagcctttaacattcccagggcatcattacatatgaagcatctctttttactcatttggatcaccttattccattgtcactgaatatttaactaatttaccaacaattcgacctggatgctcttcatcaagaattattggatcatagtttttattatctggcattagcataactaaattgccttgatgcttaatacgttttaaagtagcttcgttatcatcgtcaacaagaactgcagctatctcaccatcttcaacttcaggttgctctctaataatggctaatgcgccattaggaatggtaggctccatgctatcacctttacaacgaagaccaaaaagtgttccactaggaactggtttttcaaagatttcatcagtataaccttcgatattttcttcagcagtaatcggatcgccacaagcaatttcaccaatgattggaattgaaacaacttctaatccttctttaggataaataatattagaaggtttcttttctctggtagggaaaaagtcatcaacatttacattaaaaatttcagctaatttaaataaaacatcttgatttgcctttctagatcctaactcatatctagtcacagttgctcttgtcgtatcaagtttgtctgcaagttgttctactgaaaggccacgttgttcacgaaaatttctgattttttgaccaatgaatttacttagttccattttatgtacctctcttatgtaactaattatataacttgcgttaccgaaatggaatattttttatctttttcgaaaaaaatagttgcatttgttccagaatggttttaatatataattgttccaaattggaacggaaaggagagataatatgcagtcaagattatatgatttacgaaaacatgttaaaggaatgactcaacaacaaatggctgattatctaaatattagtgtcaaagcttatcgtgataaggaaaatggtaaaaatcaatttactcaagatgaaatgtttgctattagtaaattatttgatcttaatattgacactatttttttgcctcgtaagttccatattggaacaaagggctaagagaggtgacacaaaatgcaagcatcgctagatgaacaagattaccaagtaattactaatgaggttctcaggcgtattaaggaatgttacaacttagtgcctaaacaagatgtccaaactgacaaatgggtcggtatcaaggaattcacgagtaagttgcccgttataaaggacaaggaatgggtcagaatgtttctccttacacttccagtctttaagaactgggttatcaatttgaatgcaggtcaaggtcatcgaactaaggtaaatgtgaccaaggcattgccttggattatgtctcatcaagctgatattgattggaaccagtcattgccacgttaggaggtgaacagatggcacaaccgatatttgtaaaaggaatttttggaagacgaattatagtttctcaatttgaacaaacgtctgattttattttgcaaaagaaaaacgctgacctaataaaagaagccagcggattttcaaaaaacaagaaattgtttactcgttatcaaggtaaagactttcaaattatggagcaattaaagtggcaacccagtgttctttttgatgatgccagtaagaaccgtagtagccacagatttaaggacaccaatggaaactgactttagagtgttagtagctttctttgtttgtttccaaacctcatcatctcgaatggaatcaagtagttcatgcccagaccaagtgatgtcatagacagttaattggcgaaccattttattaataaatggtttggcactaatgaaaccgcctgagtagagctgataaagggtataaacaatatcatttttatcaaaggtctcattagcaataacatttgcaatttgagaatctgtaaaaccttggtaaagcatttgcaattgctgtttttctaatgataaaagaacatacctaacacagtcttgcttcaatttcacaattttcaccacctttattttgaattaatcaaagtatagcagaaagggagagcagttaaatggcgttggtaattggattaccaatattaattattgcaatgtgtttgttatatgcattggtgtacagcttattgtatgagcggaataaaccattgctattgaaagaaaagtatcggaagaaacattgaaaggaggtgatatgaactttggtaaatttatttcttttgttgttttttatctttgttataatgccgcttttgtatcaatttttgaattacatcagaaggcaaattgaaaatttcttttggaaaaaaagccataaaaataagaacgaatgaaatgaaagtagctgtaaattcaaattgttctttggtctgagttattaatagcccagtaatagtagaaagaataattgctatttttgaaagatcatccaagtatttttcgcttatttgaaatcctaaagtttctgtaagccagccaaggataaacaatggaaaagaaaagaagccagttagaaaaagaatagtaattaagcaatcaaatattctgagtttttggaattcaaaaattacagcatctggattagcagcatatgtaatatgtagagctaaataagtaaaacagatgaggcagaagatacaaaccataaagtcggttagtttcttactatagtaattaaatttggttaaaaacttaaaaattttacgcataatgattttccttttgtactgagttaatcaaagtatagcaaatgaaaggatggtagtttaatgagtaaattaattgcgctaatcgttggtgcttggatcatgtattgttcaatgattggctcttatgatggagcgatggcgatcctagcagtttatcttctgctagtggttcttgatccactaaataaaaaaggtacgactgccgcaaacagtcgtaccgataaataaataatctacgaggtaattatatatgaatgagtttaatttatcaaaattaaatgccagggttggcgataattgtgtatttgtatcgaatttggcagttcgctatcaaagcgctgctactcctgaagagcgaatggcaatggccatcaaaatggagaatgctgctacgatgttacgcatttcagctgagcgtttggccactgaaactaagaatgtttacggaggtaagaacaatgactaacgaagaaaagattaaggcaattaaacaaattcttggaccagaatacgaggaggtagccattttcgctgctaaaaaatcagaaattcgtgacgaacgtactaattcattagttgatgcggatcccggaacggtagcagccatgattatgaattggttacatactaatccgatagcagcttcaattgtcaaagcaactattgatactttggaaactgatccaactgctgatttatttgcacagatttttctaggaggtaagaactaatgaatttatttgaattaaacgacaactacaaaacacttgctagtcgggatgacttagatccaactattctaaaggatacattggaatcaattaaggatgatcggaagaccaaattggacaatcttgcttcatgggcagatcatttgaagtcagaaattgattttatgaccgacaaaaagaagtcatgggaagaagaaattacttaccgaaaaaataaacttacttggatcaagaaatatattactgaagttcttgatgatgccggtattaagaaaataactactgaaaatcacttacttagtgcccggaactttaaggcctcaaccattattgatagtgataagaagcttccggataagttcaaaattactgagacgactactaagccagataagcaggccatttaccaagcactcaaagctggagaagaagtaccaggagcacatttaaaagctaaccgtaacacggtgattaaataatgtttgaactccgtgattatcagcaagaaacgattgataacatcatgaattctataagtgctggtcaccgttctatcatggttcaacagccgccacgaacggggaagacagttattatggccgagattgctagacgagcaacggcaaagggtaaccgtatcttgttcgtggttcatcggcaagaaattgtccagcaggttatcaagactttcaaagctaatgatgtaaatatggatttagctaaaatcggcatggttcaaacgattacccgacacgttaataatttggacccaccggcgataatttttgttgatgaggcccatcatgttctggctaaatcatatcgaaggattcttgatgcttttccgaaagcttataagttactgtttaccgctactccttatcggttaggtggacagggttttactgatgtggctgatgatttaattattggcaaatcagtcccctggttaattgaccatcactttttagcaccagttgattattacgctccttcttacattgatactgccaagttaaaagtaaaacgaactggtgaatatgacactgattcaatcaaaaaagccatgaagcctaaaatctacgggaatgcggttaagcactatttgaaacttgctacgggaatgcaagccattgcctatacctataacgttgatagtgcaattaagttagccaatgcatttaatggctatgggataactgcaagcgccgtttccggaaaaacgcccaaagaagaacggaataaaatcattgaggactatcgccaaggaaaaattcaaattgtaaccaatgcagaattatttacagagggcctagatttaccaaatgttgattgtgtcattatgttacggccaactcaatcattatcgttgtacttacaatttgcaatgcgctcaatgaatccacgggaaggtaagactgcaataattatcgatcacgtgggaaatgttgaacgattcgggctgccgactgatgagcggcaatggacattagaaggtagcggaaaaaataaacaacaaccaggaacaacgcttaaacctgtatcagtatgtccgatatgttttgcttcgttttatcgtacaagtgatatttgcccttattgcggggcggcattaggagaagaaaaagaaattgaagtcgttgatgatgttcaactaaaaaaagttactaagtcacggctagcgattattaagaaaattcaatcgtcagcaattatgaataatgttgctggcaagcgtccaaacgaattgaagaatctgaaagaaatacaagcctatgccaaattaaaaggttacaaaccaggctgggcttaccactacgctaaacagcgtggatttattaagaagtgaggttgatattatgagtattttgccaccaaataagccacagaaggcacggcgagttccaagaaattactttatctacggagatacaatgtccggaaagtcatatctagctgaacgttttccaagtccgctatttcttaacaccgatggtaatagtgagatgaacaccgcaccaagtattcaattaaagaatgtccgaaagagcgatggaagcttgaaagagtcagtgattgatcaactagacaagattattcttgctcttggtactgaaaatcatggttacaaaacagtagttattgatgtgattgatgatgtagtaacactaattgaacaggccatctgttatgacaatggagtagaaacgctgggggatgttccttacggcaagggatatgcacaatttaataccgtctttcaagcatttgtcactgagctaaaagccttaccactgaatacggtttacattagccggttaatgatgctaactgatgaatcttctggccacaccgaagaccgaccatcactaaaacagaaatattacaacgtggttaacggaaattgtgatttagtgattgaaactaagcgctatggtgaccgttatatccggatggttaaagatcgacgaattcattatgtcaaagatgatattactgatccggcaatcttacgggtacttgaacatgtaaatggcgtctttgataagccaaagcagactactacaaaagagcagaatgaaattgttaacaaaattaaaaagcaaaatgtaaaggaaggttaatgaattatgagtttacgagatgcaatgaataaagctactgaaggttttgatccaaagaatgattcagttaataaatttaagggactggaaagtggtaaatataccgttgtagttgcaaaagtagaaaaccatgaaactccttggaatgctgaacagcttaactttgagttagaagttgtcgatggagaatcagccggccaaaaagaattcttacaaattggattagatgaattaacttctaagggtaatcccaatccaatgctagaaactaatttacgattggtttctaagttagcagcaattctaggtgttgaaattcccgatgaagtttgggatgacgatactttaatctacgagaacttggctaaagcatttgcaccggcagtaggaaagaccatgattatggatttgaaggttcgaccaaacaagaagaacccccaatatccataccgtaattatgactttgatgaagcggaacagccggaaacgccagaagttacagatgatgaaatgcccttttaagtaaatatttgagtcagtgaacttataacaccgtatggctgggaggccattaaggaggaaaaatgaaaaatctagttaattacgccttagcctatcaagcaaagggtttaagcgtcctcccaattgctggcaagcgtccactaattaagtttgctgatcgtgatccacttaccgccgaagaaataaagaccatctggatagaacatccatatgctcaaattgcgttgcggactgataagttcttcgttgttgatatagaccgcaaccatgctgataacattgatggttttgaatcaattaagcaattaccagcggaatattttccggaaactttaacccaaaccaccaagcatggtggccgacagttattttatttgaaacgttcagatatgcgagttaatcagttaattggttatttaccaggtgttgatgtaaaggcccaccaaaataattatgttgtggttgcgccatcagaaggttaccaatggctgaataagaagccgattgttacggctcctaagtcgttagtagtgaatattaaccaaatgcgagccagtaaccggcgaagttctccagatgatttagtttttaaaccacgtgaacgcaactcaactactgacttacttgagaccatcgcaaatggattgggagataaaggaataagaaataaaaacttagctggaatgattggtgctttattgtttcggggagtagaaccaaagtctgcttatcaattagcgatgatttgtaatgagaatacgcccgatccactaccagaagaagaagtgaaccggacatttcaatcaatgctaagacgtgatttgagaaacgggggtgaaatacgtggcggataatataattcgcaaaccaattgaatttgaattaaatactcaaggcaatcctaaaactaatagtttgaagaatattggtttaatccttgatggcgatccactactgcatggcaccttcaaatataacgagtttgcttattcaattgatgttgttaaggacattccacagctatttattgaaaaggggcaacttgatgatagctattcagcaattatgctccgttacattgaggatgagtatggggtgatgtttcaagaaaaattgttaaatatggcaatcactgttgaagcaaaaagccacccatataatccggttaaagagtatatggaaaagtgctataagaattgggaccacaaagaacgaatcaaagacttcctaccagtctatttaggagtacccagtggtgaagtaacaacgctgcagacaaaattattcttagtcggagcggtgatgaaagtctataagccggaaagtaaatttgattgggtgtttgatttagttggtggccaaggcgttggtaaaactactttacttaaaaagttagcccatggttggtatacagaccaatttacggacttcaaagacaaggataattttgccaatatgctgcgggcattgattgttaatgacgatgaaatgacggccacaaataattctgactttgaaaatttgaagaaatttatctcagctgaagaattagagttccggccaccatatggacgacatacaatccgccggccaaagaattttgttatggcccggactactaacgaatcaacctatttgaaagataaaaccggtgagcggcgtttcttacctaacatggctgataagtcccaagcaatggctaatccggtaactgatcttgatgatacgatggtcaatcacatttggggtgaagctgttggcctctacaaagaaggcttttctttcatattgacgaaggagcagcagaagctcattgaggataatcgaaagatatttatgtacattgatgaaactgaaaatcaaattgaacgggttctcagtacttgggacgatgactggattgaaagctcagaaattgctcatcaattaggtgaagataatctggttaagaatcgttcattagccaaaaagattaagtatgtaatggataaccggcatgattggaaagcaggacaacggcgaattaaaggaattagtcatcgtggttatagaaaagtgcatacagataatacactatgaatatagttaagtgtatgcagaaaaaacctattacatcaacgtttattaaggtttgcatacactactacactattttaataataaaaaataaatatatataaatactatatatgcgttataaaaagttgaaagttagtgtatgcgtgtatgcagtaactaaatccgttgagagagtaagaattaagctgtatacactactgtatgcatagtgtatgcaaggaggaaaatatgaatgaattaaaaaacatcagcacatcagaattacttgatgaactgattgaacgtaatgcattatttcgtgtagattgtggtctttatcggaattgggagttgaagggaaaatatcaatttagcgatattaaattgcctagcgcatatcctatttatgtaggaaattcaattattgaccgcatgattaagtgggagtgtgagcattgacgagtgaacataaaattcaaaacgatatccgggttgcactatcaaaacatcagtgtacagtgttccgggtaaatgtcggttcggtaaaaacaccagatggaagatttttttcagctggtgtacctagtggtcacccggacttatatggatttcgttggtcggatcatcaagtattttatattgaagtgaaaaacgaaaaaggtaagcctagagcggatcaaattagatttcatgaaatgctaactaaacgagaaattattcatggaatcgctaggtctgctggagatgcagtaaaaattgttgaggaaggattgattggttatggatatgaaaataaaaaagaaccaccacaacaagtaaaattagttgaagtaattcaggttataacctctcgtggagctggaacaaaggaggatccgataagaaagattattcagtattggagcaaagaaggcacattattagcagaaagttttggaaactaatttttctttgagtcacgtttctctatgtgctttagttgtttttcaggaagactattataaaacttatcaatttgatttggctgtgttattaaattgtctgtaattatatttaacagatttaaaagacttttcgccatttcttggttatcagttaagtctatctcaccaggatgaacagcattatttccaacaattcttacaatatcaaacgcttgttgtaatttagccggaagtcccttagatactagatcaccaatacgattatctaatgaatgtttattggaaaattcttttgttagtttatctattgccagacgagacaaagcagcagatgctcttggtgaatctctaagtacttttgccgcttcaatataaatttgtttaatatcatcgggcatatctggattaggagctgttaattttaaaggaaaactaggaaagataagtatatcttcattggattgccgattatgaaaccaaatagaatctaaataacatgaagtgcattttgcaactattaaattatattcgtattgttttgattttattttttctgcatatttccaatcaaattgagcatatacatgacaataaggacaaataataggagctttccctgtaaaatcattactaaaatatttagtcattaaattcacctcaaataagattatagcgtaaaggagtagatgtaatgctacacaaatatagaaagttaccaattgtggaagctgaacagtttgatgggtcagatgaaatgattgaaaggtattcagtgcatgtatttaatcctaatttagctaaaaacatcttctttataggtatgaacgttctagctattggtgattggattgttaaggatgaatatgggaattatcaagtggtagctgatgatatattccgtaaaagttatgagaggtgcgactaatgcacatttatgaagtaatcgttgtagctgtatttggcacagatattagccactttgttgttgctaagaatgccgataatgctaagaaaattattcttgattattacagcactcgtgatgatggtatcaggccaactgtgacaatgtatgacctaacaacaaaattaatcaatcttaataactacattgatgaggtgatgcttggatgagattaagtgacaaaattattatgacttcctttttactgttattaattgtttcagtcgtcttatcaatagttacgggaagtaaagtctggatatggatttttctttttctgatgacacttgagatgctttacaaaatttggcgttaggagcgtgactaatgaaagcaagatgtggcgattggagtactgatgtttatccagttgaaccgtttgtttatgaagtagcagctgatggtaagaaagaattttatcaatcagcatgggatgcttttagttctgaattgcatatgaaaaatgtgacggcgaagattatcaaaataccagttgttccaatgagtaatgatgaaattaaagcagagagtgttgcatttgaattaggcgaaaaaaggcattatccacatgtggaagaattcactaatagtaaaccgaggaggaaagttacatttcttcaggttgcggaagcttttgcaattataacgtggattattttaataattcttataataagtacggcgtttatgtaggaggtaagttactaatgacatttgaagaggcgttaaaacatgaagaaaataatgtgccagtattctatagcgatcgaaaatattatgtaatcgggcacaatgagttaaccgaacaatttacaattcgtgagctaagtggtaatccgttatttacggtgccggttgatgtacaagcggaggaattgtcatgagtattaaaattaatgcgcaaacagttgtatttaagggacaaagttttattcctagcaaaagtaactgtgagtattgtcaatttccatttaagaagttaatggttactaaagcatctccagatccatcagttaagacagaagtaccaatcaaagttgacggtgaggtatttaattattgtcctcattgtggacggaatttacaagggtgaggcaatgttacttttaattgtattaatgatgattgtctttattgctgggttcctattgggtaagaaaaatccatgacgaaaaaaggacccaccgtaaaagatgtgtcctcactaaaaatatttaaccataattattatatcagatagcgagggtacgtcatgcaaacaagtttgaatttagatattgattgtctgaaaactgcaagaaaggttactgactttcttgataagaagctggatcgctatctggctttatcggggaagcaacgttttgatttgaagtcaccagggatggacggaatgcctaaagctcccagccatggtaacggtagtgaaaatcgaatgctgaatatctggttggcagaagaggttgttgattgtgtgggttgcgctatgcggaatatgacaaaggaatcacaacggattttactaaatcggtattcggatcagatgttaacgtataacattgctagggagctaagtattagttcagcaacgtatagtcgaaagcaggaaaaagcgctgtgtgagtttgcggaccggtttgaatttcagttagttaagcacggtattcatactgaaattgatgatctacacgtttatcttgacgaggaagattgataaattgatgatagattattgagcgagcaattcatgatagaaatgtgataatagtattgtcgaatgattcgatattcatataataatcttcccaaatgaagtctagctattatggctaggcttttgtattatgtttaattgggtgatttttatatgattgaatacttaaaaacatttttggaggctttgagtatgaagccaaaaactaaatttgttggagttatttttggaatagtacttttatgcttaaaaccatttttaattcaatataatatgaaatggttttacaataagttttcttggattattattttaattactttattttttgtagcctcattaataattgaagtaatagttgaagtatacgaatggggtagaaacaagtataacaaacataaagttgaaagagattacgaaaaatatatcttaggcttgtctgataaaaagttggcaattgtaaagaaactttacgctaatgaacatcaccaaggatatttaagacaaaacgatactaatgttattgaattggttaatatgtacgtaattatgcaacttaataatgaaattatagtaagagaaagccaagttgaagatataaacgatcctgaatttctttttgtattacagccaccggctttacacatcatagaaaagaattcagaaaaatttaaataaatttaattagtttagcttaacggctgactttttactttttaggaggtgagtagcattactcaaaaattaacacagaagcaacaacgatttgtcgatgagtacattatttcgggtaatgctactcaggcggcaattaaagctggatattctaagaagacagctaagcagtctggtgctgaaaacctagcaaaaccttacttaaaagctgcaatcgaaaaacgcaatgctgaaattcaatccgagaaaacagctgatatgacagaggtgatggaatatcttacttcagttatgcgtggtgagcaaacagaatcggttgctactgctaagggtatttatgaagacgttgaagtgtcggcaaaagatcgtattaaagctgctgaattaattggaaagcgtcacggcgcctggactgataaaaaggttatttctggtgatgttcagattgatgtgggaatgggggattatgatgatgaagagtgaagaacaatggagaaaaatcaaagatcatcctcattacttggttagcaataaaggtaatgtttacagtgagtataaaggcggcttgcttaaacagatgaaagatgcttatggatattctcaggttaatttaaaccgccgctccaaaaaggtgcatcgtttagtagcggaagcttttatcccaaacccagacaaattgcctgaagttaatcataaagacgaagataaaaataataaccaggtggataacttggaatggtgtactagcaagtacaacatgaattatggtgacgtggagaaaaggtcaattctttcacaacaaagccatagtacttggaaaatttatcaatatgatttaaacggtaatttggtaaaagtatggaattcagcgagagaagccgacagacatggattcaaccgtagaagtgtgtatcgctgttgtgatggggaaataaaatctttcaaaggatacatatggtcaagacaaaagaaggtgataccatgccaaacatcaaactaaattttcctaaaccatacaacgttttcaataaacaaatttttgataacttgtttgattacagtcatttcgttgaggtttggtactgacttatggcggtgcatcttctggtaaatcgcatggtgtggtacagaaagttgtacttaaatcactccaacactggaaacatccccgcaaagtgctatggctgcggaaagttgatcgaacaattcaagaatctatcttcgctgacgtaattgactgtttatcaaattggcaattgttatcgttatgtagagtaaataaatcaaaccgtactgttcatttaccgaacggtgcggttttcctgtttaagggtatggatgacccagaaaagattaagtcaatcaaagggttatctgatgtggtaatggaagaagcttccgaatttacacaggacgacttcacgcagcttaccctacgtctccgtgaacctaagcataagaaacgacaattgttttgtatgtttaatccagttagcaaattgaactggacttataagcaatggtttgatccgaaagtgaaagttaatccggaacgagtatcaattcaccaatcaacttacaaggataatcactttttggacgctgataacattgcaacgattgagaacttaaaacaaaccaacccggcctactataaaatctatacgctgggcgagtttgctacattggataagctggtctttccagagtttgaaaaacgtcggttaagtattcgaaccttatcacagcttccctcgtacttcggcttggactttgggtacactaacgatgaaacagcctttatgcacgttaaagtggatgagagtacccgtaaaatttacgtgatggaagagtacgctaagcacggtatgttgaacgatgatattgcccgaataattaaacaaatgggttatagcaaggaagttattactgctgatgctgctgagcctaaatcgattgctgaaattaaacgcgatggtatctcgcggattcgtccagctaaaaaggggaaggacagcattatacagggactttcatttatgcagcaatatcacttagtcgttgatgaccggtgtgtgaaaacgattgaggaattggaaaattatacatacaagaaggacaaacaaactggtgaatacaccaatgagcctgtcgatagttacaaccacgaaatcgatgctatcaggtatgctttatctgaaatcaacggaatggctagtccaaaggcaactgtaatgaaaaatatttatatttaggtggtgattgaatggaaacagtaaacggtaaaggacaaattttagatggccatatttttatctatccagctgatgaagaagaacttgatccgcatgatttactgtcgttcatgagaagaaatattcagtatgctaaggattacaagcataatatgcaaatgtatctaggtaatcacgatatcttagatcaacagcggcggatgtatgggccagataatcggctagtagcaaatttaccgcattatattgttgatacttataatggattctttactggaatcccacctaagattactttagatgataagaatgagaacgaagcattacagcaatggaatgacactaattcgttccaggacaaattgagtgaaattagtaagcaaacggatatctacggacgttcgtttgcttttatttatcaagatgagaacgcagacacttgtattgcttatgcttctcctacagatgccttcatggtttacgatgatacggttgctagaaaaccttttgcttttgttcgttactggaaagatactgaaagcggattatggaccggaatggtttattacgctaataaaattaaaacctttaaaggtagtgttgttgaagattcagatcaaaataatatgtataatttagtgccagcagttgaattttatggaaatgaagagcggcaaggtgtttttgataatgtgaaaaccttaatcgacgaattagacagagtgttatcacagaaagctaaccaagtggaatattttgataatgcttaccttaaaattcttggtcttgatttagatgaggatggtgatggtagaccggatgctaatttaattggtaatcaaatgatttattcgcctaatgctgatgctgctaatgccgatgtcgaattcatttcaaaaccagatggtgataatatgcaagaacatattattgaccggcttgtttcaatgatttaccaggtaagtatggttgctaaccttaatgatgaagcgtttgctggtaatagttctggggtggctttgcaatataagttacttccaatgcgaaatatggcagctaataaagagcgtaaatttactcaggcactccggaagttatatcgaatagtgtttagtgctgatcaagtagtcaaagataaggaagcctggcaagacttgctctttgatttcaaacaaaacttaccgattgatgtttctgaagaagctgatactttacaaaaactatcaggggttgtgtcaaaagaaactgcattccgaaatagtcgtttaattgatgatcctaaaaaagaagttgagcgtatgcaaaaagagaagcaggaagaaataaaccaagcgcttcaacattctgcttctgctacagatcaaatgctaatggatgatcaaaaagaaaatgataaagagatagttggtttccggaagaacggtgaatccgatgacgaagaagaataattattgggctgatcgtattgctcgggaacgtaaatggcaagaagagcaattaagtaaagatgctcaatttaatcagcgccttcaacagtattatgatcaagcaattgtccagattaataaagacattgaagatcagataaattctttagctgtccggaataaagtttcttatgctgaagctcaaaaagaagtgtccactaccgatattgctgattatgaaacagaagctaagaaggtagttcaggaagctaatcgtttaagagcacaagggaagcatgttacttacaatgatttctctgatgaagttaatgaacgattgaggaattataatacggcgatgcgatataaccgattgaatttattgaaatctaaaattggtttatcgatggttgaagccggaatgaatattgatgctgatatgcaagctaaaattggtaaagattatactgatgagctaaaacgtcagtctggtattctagatcattctaccgaaaatagttcgttttggacttctaaagatgttgcgaaacaagtaatgaagcaaattaatggagcaacttttagtcaacgaatttgggctaatcaagatactttgaaagctcaacttgatacggttatcaccaacggaattttaactggtaagaatccgcgagttgtagcaagacaattaagagataaagtaaaagtcactgttaaaaatcacagttatgttactgaacgtattgccaggacagaatcagcacgggttcagtattctgctcagattgaattaatcaaaaagaatggttatcaatttgtccactggattgcggagccaagagcctgtgatgagtgtcgaaagattgcgacgcaagataatggctttggtgatggtatttatcgaattaataaagttcctaaaataccagacgatactcatcctaattgtcgctgttcaattagtgagacatgggtcgatggtcaacgcaatatagcattatctgatgatgaacaggcggcattgaataattatattagttcagattcatataagattaatgatgatttgaggcgtaataagatttctaaaaataagaaacaatttattgaaaacttagatgccgcattggctaaaatgccaatttatcatagtagcaagccactccagcgtgattatttctttgataaacaagaagcattggatgattttattagtaattttgaaattggtggagtcttcactgattcatcatacatttcaacttctaaaatttattatggacagggcaaagagacaattcatgttattattaaatcaagtaagacaggaagagatatctctgagtttaattttaatgagcaggaagtattattccccagaaatagtaagtttaggattgatgatgcatacgttgatgataacgggaagatgacaatggtttggagtgaattagatgagtaacaagccttttactgataaacgttggcgagataattctttggaaggcgttaaatttgataattcaaaagtaacgtcagaacaaaagaagaagacagaagaattccatgagttattcaaaaagacgtttgctaaacaattaaaagaaaaacactcacataaaaagtaggtgatccaatgggaaataatgatttctttacggtaacgtacaaaatactaagttatcttaagtattgttatgaaaatggaattaatcctgatcctaatattcttaatgctgatacatttaatattagtaaagttcaatttggaagaactctacaaatgttaagcgagcatggttatatttcaggagtgagatttacacaagccaaaatcgaaggtactgttgttggtggactccacaatacgtcaataacggttgaaggtctgcaatatttagctgaaaactcaatgatgaaaaaagcatatcgaatttttaaagaagtcagagattggcttccgggtttctaagcattcacaaattagtgagtgctttttgttttggactttttacttgttgcagtcgttaaagaacaacccggatattacagtccaccggactataaacgaggtgtatttatgtttgaaaaattaccaatgcgtttacaattctttgctgaagatccaacgccagatccagataatgatggtgcacctgaaggaactgatgatggagataacggtaaaagtgaaaagacatttactcaagcagaattaaacgatattgtcaaagcccgagtcaatcgagccttgaagaataagcaagaggaaattgaccaggctaagagtgaagctactaaacttgccaagatgaataaggatcaaaagcaagaatataagcttcaacaaactgaaaaacgtgcccaagatgctgaagcagaattggcccgttataaaatgcgtgatacagcgaagcaacaattaattgatggcggttatgacaatccaactgatgaagatatcgatttaattgttactgataaagcagaaacaactaaagaacgtggtgaagcatttcttaaagcttataaccgaattaaagaaaatgttcgtcaagaactattaaagggaaagtcaccacgaattaatggtgctcctgctactgcaatgactaaagaacaaattgcaaagatcaaggatcccgtcaaacgggtccaagccattcgggataacttatcccaatatgaaaaataaaaggaggaatataaaatggctgaaactaatttaacgacaagtacagacctagttgcacaatctatcgactttgtagaacaattctctggaggaatccaaactttattgaatgcattgggagttattcgtatgcagccaatgactactggttcacagattaagatttacaagtcagaagtaactaaggtcgatggtaatgttgctgaaggggaagttattccgttaagtaaggttactcgcaagctagctaatactttgacattaggatttaaaaagtatcgtaaggtaactaccattgaagctattcagtcagctggtggtgctacacctgctatcgtggatactgataataagctacttcgagaaattcaaaaggatgttaagaaggacttatttaattacattaccaagtctgatgcaaacaagactaccgcctctggtgacgattttcaaaaggcaatggcggcagctttaggacaactttcagttaagtgggaagactacgacacacaaactgtcgcctttgctaatccgcttgatctatatgcatggttaggtaaccaaactcttactgttcaatctgcctttggtttgcaatacattcagaatttccttggctttgacactattattctaagtgctgaagtaccacagggaacgattgctacaacagttgcagataatatcaattacttctacgctccaatttcatccgttggtcagttatttaacatgacttctgatgaaactggtttaattggtgtaactcatgatgcagttaataacaatttgtcatacgaaactgttgtaacaatggctaatgtattgactacagaacgtttggacggcattgtattgtcaacaatcagtggtgctaagtctgctggtaagtaggtgattgaatggaccagaatacggttttgcaaaacttaaaagtaatgcttgaaattaaaaatgatgaccgtgatgctttgctgaaactaatcattgataatacagaccaagcattgcgatttaagctagaactaactgaagacgaaaatttacctggagaactaggttatattgaattagaagtttcagttcgacgattcaatcgactgcaaaacgaagggatgagtcaatatagtcaagaaggggaaagtattacttttaattcttcagattttgatgatttccttgatgatattgatttgtggaaacgacgacaccagaaagatgttaaatctttaggtgccgtttcttttattaatccttatgcggggatgagtaaaaatgcgaaaaacacagataattaagttttattttcaagatgaaaatggctataatccatatgcagaagaagacacgattactagtcctaagctagtagcacaacggtatgccaatgttactgatgtagggacaaatcgcctagttgaattatttagcaggctagatcagaacgccaaggtaattcgattggagtctccagtaaatgactcttggtcatatctgactattgatgattgtcctatcaagtatcgtcttgaaacctgtcggaaaccattaaaaggcacaacgctgattgtaggtgaagccagtggctaattcttttaaggttgatgttaaaggtactaaagaactagcgaatttcttaaagaagaataaagatttgactccagttaaacggatagtcgcaaaacatggagcaggtctcaaaaagcaaacgcagcaaaatatgaacaatttgtataagggccactacgaatggaagaagggggctgggctaacaatggttagccctaccgggaatactagacggtccgtaacaaatacaatttctaataatggtttaacagcaacggttgctccacaaactgaatatttcccatatcttgaatatggaactcgctttatggcagcacgaccgacattacatccagcgtttgcaattgagtctatgaaatttgctaatgatttgaataagttatttaagtaggtgagaaaatgtcaccaagtattgaaatttatgatgcagtttttgctcaggtccaaaagcattatcagacctacgatcacccaccgcagttaaatgaaccagttacctatccattcgtggttgttgatgatagccagtcgattttgacgaactataaaacagccacaggaatgcgggtaactttaatagtccatgtgtgggggaagtctaaccaacgtaagactgttactaagatggttgatgaaattagtcgtctggggatgcaagcagttcggacgaaacattatgcttggcaaggacgacctaatgagcaagaacaacaattattaactgatacgagtgttccgaatactgtgttaaagcacggttatttaacactcgtttttgatttgaaataaaggaggataaatatggcaacatatccagtattggaagggaagaatgcagttctttttgaacgactattagaaaatgcaaggaaagagccggcacaattgatcccgtatcaaacatcactaagttatgatcctaaacgggatactgattcaacaactacgaagatggggaatgttcctactgcttctaatattgaaacagatttagaagtagagttcctaaatgcaatttccaaagctgcagatgatgtttatgattctttgtactttaataagaagattgaagtatggaaggttcatattgatcgagtccggtcagatggcaaagtttatgccgaatatatgcaaggaattgtgtcagaagactctaatgataacgacccagacgatcattcaactcgggatgtgacctttacgattgatggcgtggccaaacgtgggtgggtcactctaccgccagaaatcaaggaagaaattgactatgtattccgtggcttggcacagcttaaaggcgatgacgacaacggtgaaggtgaagcttttgctgatggcgatcgtggtgctggtgcaaatgaagcagtaacaactgaataggaggaagattatgaagttaaaaattaatggtcaagaccaatcatttgtattcggagttaagtttttgcgaaaacttgatgcttatcggggcgctgaacaagaaatccaaggagttaaggttaagctaggaatggggctagccatgatgcttccccaattaatgactaaggatgcggccgctttggcagacgtgttgtactgtgcggctaagtctagcattaagttagatacaattgatgattatattgataattgcaaggacttggattcattatttaatcgggtaatgaatgaaattaaggcaagtaatgccgctaagccgattgcaaaaaatctaaaagcctagatggtcctgagcttagttcagaacaaagctatcacgaaattcttttgaattcgttggcttatctaggctttcataatatttcagaaattgaagaaatgggattggctgaatatcagctccggatggaagcctataacctccaacgggttagccaggaacgagacttagcattgcaagctttccttaatcagtcggtacaagcgacgaaagggagcgaaaagcacccaattccgaagtataagaagtttagccaattttttgattatgataaatttgttgatgatgttcgtgggcactatgagcctgactatcagccaacaagcaaggccagccttgaaaagaaacgaaatgatctaatcgtcaagcggtggcgtgaattccggaagatgaaacaaaaacagagaggaggtaatggctagtgtcacaatcaatgagagttgaagcggtattatcagcatacgatgagagttttagcgcaaccttagataaggcgcttaaatcgattaataatttaggccgtgaaacccagtcaacctctcaaactgttagtgcaggtggttctagtatttccagtacctttaaatcgatggctggagcaatgggtgtagttgcgattgctggtaaagcatgggacgttgttaaagattcaatgagtggcgccattaaccggtttgatacattaaacaagtatccggtagtaatgaaggctttgaattattcaactaaggatgttgcaaagtcaaccgctatcttatctaagggaattgatggattacctacttctttgcaagacgttacaagtgttgcccaacaattagcgccattaactggtagtgcaactaaggcttctaagtcggcgattgccttgaataatgccttccttgcctccggtgctagtgttgccgatacctctcgtggacttcaacaatacacacaaatgctttcaactggtaaagtcgatttaatgtcttatcgaacattgatggaaaccatgccaattgcattacgtaaagtcgccaattcatttggttttactggtaagtctgctgaacaagacctttataaagctttgcagtcaggacaaattacggtagatcagttgaatgatcgttttatcaagctgaatggtggagttaatggttttgctcaattagcaaagaaaaatagtgaaggtatcggtacatcttttgcaaacttaaaaaatgccgttgtcaaaaatctggcaaatatgttatcggcaattgacaatggttttaagcaagcgggctttggaagtattgcacaagtcctagacaacatgaagggtagtattaattctgcttttcaagttattggaccagttgttactaatgctactgttgtagttcttaattttgcaaaggttataggcggagcgcttaaatctgctttcagtaatgatatttttaaaacagcagttgtgggaatattaggctttgtgggtgcagttatggcagcccataaggttatttcaatatttacaacattaagatctgcaatagttggtttaagtgtgattacaaaagctggtaatttggcaatggcgtttagtgaagcaatgtcaacacttgctaaaacttctaagattgctggtggagcgatgaaagcattcagtgcggtggcctcattaggtccctggggaattattgctgttgcaattgcagctgtggttgcagccttaacttatttctttacccaaacgaaaaccggtagggctttatggcaaagttttactacgtggttatctggagtatggcagagtttggttggagtggctactactgtttggaatgcaattggtaatgctattaatgcagtagttaattttattaaaccttattggcaaggattattaacattctttaccggaatctggacatcaattgtggcgggtgttgctccaatttggcaagggttagttaatgtctttaatagcattatcagtgcaattttagccgtttggcaggctttagctccaattattgttccgattgtagctggtgtagttgctatcattggggcaaccctaattacgattgttaccgtctttcaaactgtgtgtaatatgcttgtacccattgttcaagttgtatggcaattaatttcaacagttgtatctactgctattacgatgctaggtacaataatccaaacaggcttggcaattatcgttgctatttggaatgtggtctggaatacattcagtattgttgtaagtacggtatggaacgttattactactattatatctaccgtgctgaacgttattgcgggaataattcaagctatcactgctgcaatacaaggcgattggtcaggagcttggaatgcaattcagaatgttgtatcaactgtttggaatgcaattgccagtattacttctagtgtattgaatggaataaaaggaatctttgatggtgtaatgaatggtttaaagagtattacttctagtagttggaatggtattaaatcgctattcagtgaaggtgttaatttcattaaatcagttgttcatatagatttaggtgctgctggtagagctatcatgaattcactttggaatggaatgaaatccatttggaatagtattaagaattgggttagcggtattgctgattggattaaagaacataaaggaccaatcagttatgaccgtaagttacttattccagctgggcaagcaattatgaatggtcttaataacggattgattaatggattcagtgaagttcaatcaaacgttagtgatatggctaatcaaattcagcaagctattactaatccaggctttgatattggagcaagtattggtaacttgggttcaattaattcaaattatactggtagcctggcaattcaagatagtcagttacaaatgcagaataatgctttgcttcgtcaattacttaataaagacacgacaatggttcttgacgatggcactcttgttggctatacagcggatcaatacgattatcgcttgggtcaaaatacagcattgaaggataggtggagccgatgaaattcttaaataatgactattcttttcgtggattaggacccacaaaggatgatccagaatacttagaaaatgcagaatatatcgactttgccggttttaattcttctgattatgattggtggttgattgatcgaacagcaactacgccagaagaacaagaaattacagaaagcgtcccttacatgcaaggagaatatgatttctcaatgtatgatcaggaacgtttttttaagacccgtgagttgacttataagtttgtatattttggtgaagtttatcaggatcgtaaagcttacgaagaggagcttaaacggcaattactgccacatggtttcactaaactaattgattctcatgatcctgtttactactggtcagctaagtgtactagtgttgaggttgaggatgaccaagaaaagggaatgctcacagcaactattactttcaaggcttatccttttgcttatactaatcataacgagggcaccgattattgggatgatgtcgcatttgatcattggatttggcaaccagttaaattcaatgttaacggtgatcaggatgttaatgttaagaatatcggctcacgaccagtcgaatgctcatttcaattgacagggtccataactttgaagaacgattcaattggtgaagtaggtttaactcaagacaattttaaaacaaccacgattgtattagagatgggtgacaataaaatgcatctatccggaaacgggacaattgaatttcaatttaagcgtgaggagatgatttagtgtaccgaattattggttataatgaaccaacagataaagcaggatttattgtactggatccccgagttaatcgtcatattagttcgggaaaactcacgcttaaagaatctaatattgatgatttgactattacggttaatcaagcaagtccattatgggacaacgtaaggccttatcatactcatgttaacgtttatgatgataatgaacttatttttcgtggacgagctatcaaacctaaaaagtcgatggaagaaagcggacaattcattcgtgaatatgtttttgaagatattgaagcatatctcatggatagcacccaaagattttatgaaggtgttggtcaaacgcccaaagaatttttacaaactttaatcgatgttcataattcacaggttcctgactataaaaagtttcaagtccggaatgtaaatgtcactaataataaggatgaccaatatcgacaaattgattatcccaaaactagcgatgctattaatgataaattagttaaatctcttggtggttatattgtgactacttacaacgctaacggaataaactacattgactacttaacggatattggggttgatcataaagatgatactcctattcagttagctaaaaatatgaagtctgcaagtatgcaaattgatcctactaaggtgattacaagactgattccactgggaaagacactagaaccatcaaaagttgatgtaagtgatgatgatggagagggcggttctggatcattagatagccctgaagaattttgtaaatcagaaattaatgctacttggggtagtgatattaataatatgaaacaagattttgccgctcgttcttcgagagttcgggcttggggagtggacgttaatcgtttatatgatgtggtgaaaaatgctggagtaagtcctgaatggttctttgcttatgaacttcaagaacaaggaacttactatggatggcttaaccatacttatcgacacggtgatgcgtatagtgatgcgcaatctgtttgtgagtggattaaaaattgttcaaatagtaattccattaatccagcatggagcgcaccggaaggatcaatggcgccgaatcaagcattagcggataaatggaatcaagagtttggaaaaggtactattggccgcgtttatttacaagggactgccgctgctgtttgggatttagctggtcaaacgcctaatccagctattggaaagccaattagtggatgcatttcttgtattaaacgttggggtggtcattctaatgcagctggtggtacatggggatggccttttcctgatgttggggaaggtcatttttctcaagttcagagtttcggaaatgatggcggatatcgtcaaaatagttatcacgatggtgtggattttggatcaatagatcatcctggtagagaagtgcattgtattcatggtggaacggtaactatcaaatcagctatgggtggcttaggtaattttgtggttattcatacgccggaaggattcaatatcgtttatcaagaagcttttagttctccctctaatattattgttagtgttgggcaaaaagtaaaaactggtgatgtaattggatatcgtgatacagaccatgttcatattggcgtaactaagcaagatttttatcaagcagttcgaaattctttttctcctgcaggtggttggctagatccagtaaaactaattaaagaaggtggcgatgggtctaaaccacaagaaggaaagaaagatcaaactgttgataatagtaatgctgcacgtcctaaattaaccattactactgtcaataacggtagagactatattgatattcctgatttacaaaaagaattcggtattattgagggaactgttgaatttgataatgtagatgatccgaatgttttaatgcaacaagctcaaacatggataaaggctcaaagaatacctcaaagttgggaagttacagctttagaattacatatgacaaacttcaaatcttttaaggttgctgataggtacatgtttattaatccaaatgttgcaaaaccccaattattacgaattactcaaaaagaaattgatttactaaagccccatgcgtcttcattaacgattggtgataagacgatggggcttactgattatcagttagaaaatcaagtcaattttcaacaatttaaggaaattcgagtgatggttaatcaggttgtccaaacccaagagcaatctgctaataacaataataaggttatgcaaaattttgctagtagtgctgatcttgcacaaatgagacaggatctaagaaatcttcaagatgataacgatcgtgctcgcaaaggaatggtttccttagaagaattcaataaactaaaggaacaagtagaaaaactaacaacaggaggcgatgataatggcaagtgaaacctatgattatgagtcatttgataatacggatcatactatgaaacaaatcgctgacgctattcgtcacaagggttatggaaaagatgtgcgtgaggcaattgcacagggcttcgaaaacttagataaacatttaagtagtattgaagaagaactgaaacaacaagaaaagaaaaagtcatcgtctatggatgatatttttaattcttttggtaagaaggagtgatgataaatggcaaaagagattagtaatctgattacctttaacacctacaaatttgaacgaggcggccttttggttgatatgtttaaccaatttaatgctcgtgtaggagatcaaggaacggaattagccatccagtgggaaactagtaagactgaaactaaaattaatttaaaagaacgaggattacatttctttgggacaggttcagttggacagtaccttgaaaaattagaagatggaactggctttaagatgtctgcagatgcatctaccgttgaatgggaagataaagatgaagctggtagtttagacgatggaattacggttgttaagttgccaaaacaatttttccctcaaaaaggtattttctttggttactttggcctaaaagatagacaaggtaatatctttactagtgttaatgtttggttccgtgttcttggcggtgttccaacgatgggggctgctattccttactttgttactgaatttgatgaagtattagagcgatgcaatggtaagattattgacgctttagcagaattacgtgaaaagtaccaggcagaagttaagaagaatgaggatatgtctgcggaaacaagagcagcgttgagtaaacttgctgatgctgttggtgcaattcaagcgcagattgatgcaggtaatgtaattacacgtaaagaatataataatcttgctaatcagattgataatcgccttagtaaaatgacacagaacattgagagtttttcatcactcgatgacttaaaagctcaatatcctaatggaaaagatggactctttgttactaatgacaataatcataagtatcaatacaagaatggatcatgggtagatgaaggtatatggacagttactacctttgatccagaaacgcgacgacgccttacataccttgatacatctaattctattttgcaaaaatcactcagtgaattgactaaagaagtcgttgatataaattggtttttaggcgaaattgatgcaaatactggtaaaattacacctcacgaaagttttaatcgtgcatactcatcactcaaagtaattggtaaatcacatgcttttgaatttttgcttaatactgattatttgcaatatattagtatttttgaattcaattcaaatggggagattattaagcacgatagtgttggcgataaagcgatatatacatttgaaaaggatacgactgcggtaaggtttcagattactagtactgctgctactatgaagcaaaatgatttacgcgatactattcaaaatagtgggctaaaaattatcgatcgaggacaccgttcagtaattaatgatattgatcatttatatatccgtgaacatttaatgccgattgaagcaattgaaggctatacaattaacactaatgttgattatggtgaaactgttgatgtatcacatccaatagtaacgtctgcgtttcaatatattaatcaagtatgtaagccgggcgatattttcgtaattaataatctatctggaggctttaacgcaatggcttgggcctttattgatagcgagaaccggttaattcaaaaatctgaagtaaacttatctcaatctcaggttactttatatgcgccaagtaatgctgcaaaattaattatcaataatatggatagtaactgtacagcatatagatatactccggataaagaacatttagctaaaattaatattgctttaactaccaatattcatcgaaatatcaagttagcttatcaaacaggagaaacagtctcattaattcctgaaaaagtaagtaattacaaatatattatattagattgtaattttaatgatgctttcagaataaagggttatggtggattgaatccacgattatatggatttatttctgagcaaaacacattaatgaatgttgcgcctgcaaatgttaatgatcaattaactgatgtctttatcaaaacgccaaaaggcgccaaaaaattagtagttaatttcaatcttgatcaacaagtaaatcccaaacaaattgctgaactttataagcttccagacattaatgttattactgagcaaaaaataaaaaagaatttattgaatcaacaaacagtcgatacattaatttctagttatatgaatggtatattacttggtaaagatttagccaatcatcttgcggattttgctaaaagcggcgataaaatggttcatgtatcaacgttttataaagttaacgatactctttttatgtcttattatgctaatacaagatcggcttacgaagatccaacccagcatacagcacgattagtttatgcaccgtttgagaatctaaatcaacaaacgtacatcgatgtagccgacattggacaagaatataatggtcaaaagattgaagcaatatacgattctttgcttcttaaaacaagtgatgattcatatatgatctatgcctttactgctaaggtaggtggtaagttctatatgctttaccgtcgttttgatcctaagactaagctgttgagcgatattcatacaatgaattttaaagttggagtaatgacgtcgacatttgatacagtaagcgttcatgatttgttagctaaggcaggaattgactatgattatgaagatcgtgatatttcctttgtccaaaaattaagtccacggattgaagatggcgtagtgcaatactatgcaggtatcggaatcttacatttttgctttgtagtaaaatcaagcgacttaatcaactggacttttgtcagtactccagactttatgtacaagccagaatttgaaccttctgtatatgttaagggagacaatgtttattatttttgtcgtcagcgagggacagaaggtaatgcagttttagctaagtataatatccctaatggtcaatggtcgaatccgattcttgtaccagatactcaatcacgctatgactttttcgagaataatagtcagttgtaccttgttcattcaccgctagaccgtaatcatattagtttgatgcagattgatcagaatgttctggaaaagagctatgaagtagcaacagcagtagtacaagattgcttctacccatttactcaaaatattgatggtcagatgtatatgagctttacacaaagtaggcaacatatttggctaaataaatttaatccccacagtctgctagatagtgatgtagcaactattttcagtaatttaattgagtagcaaaacatagtcgccttataaatacacaatacatagaaagttgcattgcttaaatggaaacttaatgggcggcttatagacttttattatttaaaagagtatactggaattattctttttattgggaggaaatataaaagtgacaactaaagtgagagataaatcgcttgatattatccgggggagcatccttctagttgtcttgggtcatatatctgggataccttttgagttaaaaaagtacatatattcttttcatataccactgttcttttttgtttcgggatatttgttcaactttgctaaatacaggtatttttcttataaagagtttataaaatataaagctaaaaaatatatcctaccttatttcagaatggggttgatatgtttgcttctatttggcatagtttatccactatttgctgaagggtttagtaaacagtatatgcttcaatctacaaaatatgttttaggtttactatactcgcgtggaggtcctaattatatggcctggagttcgccactttggtttctaacagccttatttattgcagagattattttttttgtggttctaaaatttaattttaaatatccattaatagtgtttggaatcttagctatattgagttatatttactcgattacaattaaaattccgttaccgtggaatattgatgttgcaatgtttgcagtgttattcatgtacctaggctttattacacacaaatataatttaactaagcacattaacttaccggttttcttacttttgattgttatttttgtattatctgtagcttacaataatgagattgacatgaatttaagaaactatggcaatggatttttaacaattattagtggaacaataggtactgttatatgcttgcaaattgcgcgattgttaaaagagaataagatattagagttttatggtaaaaacacattatttatcatgggctacacgtatgctgtgtttaattgtattttggctttaagcagccattttagtactgtaaagaatgttgtagcttcgtttttgattcaaattataattttaactttattaatagtactgaagaatttattcaaacaaataaaaaagcccatttatgcatatactaggaaaattaacaattaaaaaaactaatacgtcctactcagggcgtttttattttaccttcaaaggagatgatcaacattgccctatcatttatttatgctgcaccaaatgcagacattagttgatgataaactaatgtgggcttttacaatcgtgatgattgtagatttaattacgggaatgattaaaccgtattatgcaaagaaaacaattaagaaaactaatagttcagttggaatccctgggataattaaacacacagtaatttatttagtggtagtaattgcttatccatatctttatacgattggagcaagcacgatggctaccacttttttaattgcttggatttatcaatatttaatttcaattgtagaaaattggacagagatggggtggtggttgcctaaaccaatcatggatttctttgaagccaaattagctaaggatcaagaagattatgacccatctaagtacaattttcttggtaaatataaaggaggtaaaaagtaatgacagaacgaaagacagtaattgatttagctagttttcagagtcacttaacagttaatgattacaaaaacatcggtgctgactatgcaattgttaagacaacagaaagcacgaactatgttaatccttacatccggtcgctgattgatcgaagcgcaggtggtggaattaggggttatgctttctatcactttggccgtttccataatgatgcacaagcggtagcagaagccaactactttatcgccaattctaaggcacaggcaaatgtgcaacccggtacattaatgattcttgatgctgaaatttctaacatgccaacatcatcagtaaatgtgttcttaaataccttacgcaacgccggttatcacactggtttctatacgtataagtatctgttgcctaactttgacttagagtcaatccatcaccatatggatatgttctggttagctgcatatgtatatcgcaatggaacgccagcagggaagaacccagactttaattacttcccgtcagctaactatattgatatgtggcaacataccaataatttgcttggctacaatgttgatggctctatcacattaaccgataatgcaatcaacctatttaatccaagcgaagcaccagccccagagccaaacaaaccaattgaacaagaaaagccagcaattaccactgaacttccaactaaccattgggttgatgatcttggtgatcgttggtttgctgaaaacgggacatttattactggcactgcaattaacttgcggtggggtgctaagactaacagtgccttaatcgctaccttaccagctaatagtgaagttaagtatgacgcttggtctcgccacgatggctatgtatggcttcgtcagccacgaccaaacgctcagtacggttatcttgtttgccgtgatgcaaataataaccagccgttcggtacgtttaaataggtaaaaatttaattagccctagtggttattgcataatttgcgatagtcactagggctttttttacgaacacacaaaaatcacacaaagaccagttaaagcctaatataataggaagagttttgcccaccggaggcatattagtactttggtacaaaattgtcagctaagctaatgaaataggagaaggcttgttatagcaggctttctcctattttttgtgcgcccggcatgggtattagctaggcggtgagagtccgctatgggccgtagtagtcggaaccatgagctgaggacaagggtgtccactgtgaggtggaatctgaaggaagtctaaggcaaagtactgcaccgatgaacaagaagtagctataaggctggaactaactggataagactgcatgacaagttaaagtccaacactactcgaagttactttcagtaaagctaccggtgacatggtacgaaagttaatatccttacccggggagatctggcctacacgtttccgacaagaggaataagtttaatttccacagaaacaagcggtgcagtgatgtagcgttgagtaagccagaagtcagccgaggtcatagtagtctgagtaatcagatgaaggactgaacgacaataacttgtaacttatatcggaggtgtaatcaggtgcgacaatcgcagaaaacagaacaacaagctgaccgcttgtcgaggataggtttggaaaaccgaaagtacacaagggcgcgtagtaccgattatggtgaaggtaaaggtatgagtgtcactatccaagacttagtcttggaccgcaataaccttaatcaggcttatttgcgagttaagagaaataaaggggcagcaggcattgacgatatgacagtcaatgaccttctgccatatctcagagaaaataagacggagttgatcgctagtttgcgtgagggcaagtataaaccagcaccagtcaaacgggtagaaattccgaagcctaatggtggagtaagaaaactcggaataccaacagtggtggaccgaatggttcaacaagctgtggcccaaattcttacacctatctttgagcgtgttttctctgataatagttttggcttccgccctcaccgtggggctcacgacgctattgcaaaagtagtagatctttataatcaaggttatcgaagagttgtcgacttagacctaaaagcctattttgataacgttaatcatgacttgatgattaagtatctccaacaatatattgatgacccatggacactaagactcattcgtaagtttctaactagcggagtcttagaccatgggcttttcgctaagagtggaaaaggaaccccacaaggagggccattgtcaccactactggcgaacatctatctaaatgagttggacaaagagttgactagacgtggtcaccactttgtgcgctatgcggatgattgtaacatttatgttaaaagtcaacgagccggagaacgagtaatgcgaagcattacccagtttcttgaaaagcgattgaaagttaaagtgaacccagataaaaccaaagtcggtagcccgctacggttaaagtttcttggcttttcgttgggtgtagaccacaatggagcctacgcccgtccagctaaacaatcgcaacaacgagtaaagaaagcattgaggttattaactaaacgtaatcgtggaatatccctgacaagaatgtttgaagaaattcagcgaaaaatgcgtggatggcttcagtactactcaattgggaaactaactgactttattcaacgccttgacaagtggttgagggtccgaataagacagtatatctggaagcaatggaagaagcttaaaactaaggtaactaacttacagaagctggggctgtcccagcgtgatgcatatgtcttcgctagtacccgcaagggctactggcgaactgcacacagtaagaccttgagctattctctaactaatagaaaactggaacaactcggacttatgaatatgtccaagacgctccagtcaattcaatgtgattaagttgtcgaaccgccgtatacggaaccgtacgtacggtggtgtgagaggtcgataattgaactaatcaattatctcctactcgattgtttaaattttgattttaaagaaatggtacaaaatggtgcaaatttgtataaccggtgcacggtaagcagtccatattgacacgttattgacagacaaaaaatccccgtagaaccgtccttgatggcttcacggggattttctattcgcaacattcttcttgtacgttttttgaccacggcaaaaaagctgccagatcttgacaattgctctctggtaggtgatcaaacaagtattctaagtaccgctggacgttaagctggtttagtttagctgtctctactaagctatagtagacggcgttcgccttggcaccttcttcggtttttgcgaatagacaattctttcgaattagtgttgatggccgaatactttgctcaactgaattgttgcttaacggtaattgtccatttttttcaaatacatgatacactcgtgattttaactggatggcgttctgaattgccttacgcaactgtccaatcggctggctaatctggctaatgtaattgtaaaatttatccattagcggtttgacatggatttgccgctgcactaacttctcattggccgtttgataactcaactggttttccgaatggaaaacctgactaagaagagttattgcttgttgcgctttggacgccttcattgtttttggcagtgctttgaccaatttgacaaattctcgtcgaatatgcactaagcacgaaccaaattttgcttgcggatagagttgattactataccctttatacccatcgcacatgataatacccggataattattaccgactatttgtccaatgattctaccagaacgcgtattggcgtgatgaaagactacaatcggatgttgggcaaactctttcgttgtccgcgttacccagaaatagtcttgggatttaggactatcaacgactttaaaaggtgtttcatccatatgaatgactggttcttgtctaactgtattgcttaaatactgatacaacggctctaagtacgtttgactaactttaataatattcgaggccatttgcttggcgctaacaggtaatcccaacccttgtacaaagctttcttgccgatggaaaggcaacgccagattaaattttaaataggcgataaatgccataatactgcttgaaaagtaactatgtggtaataaagccattggtgccttactagttaccaatttatcatttccatcttgactacagtgtttacacttatagctttcctcatataagttggcacaatacaattcaggctcttttagtctagcttcccgtcgtgctaacctctttccaatgtgagccattttgtgctgacaatctggacaggtggtcgtttttaaagaaacaacttcctcgacttgaggaagttggtctaaaaactcttgacgagttagctgtttcttcgctggtcgatgacgtacgatcttagtcgttgttgttttaactacttcagtaatctcttgatccaagttcagatcatcaactggatcaaacagtgataattgtccatcagctacctgctctaaaacttcagttttttttccaaaaattatttcctgcagttgcttaattgtaattgcttgttgttcaagttgttcttgagctttcttcaactgcgcacgtagtgcttcgttttctttctttaatgactcagccattgtacgtcacctccaatctaataaacttttgttattatatcagagctaaaacagtttaaaaagagcttagtatagatttcctggtttgattgtatgaatacgtcgctcgggaaatggggatagacctgtaaataaggcatttagttgctctggttttagttctttaacttcacttttgttcttaggccatcttaaactaccattttcatatcttttatatagcagaatgaaaccttcatcatcccaataaagggctttgaaccgatcattgcgactaccacaaaataaaaagagcgaattattatataaatccaatccaaagttttccgcaactaccatcgctaaaccgtcaattcctttacggagatctgtcttaccacaaacaaggtaaacatgctccggtgcctaccaattaatgagcataacgaataaccactttagctatatcagtcgcaagactgggattagctcccttaaagatcgttaattcaatgttatcagcttgtagttttgcggcgggtcgaggaataaattcttccttattaactactgaattcttggtcttaaaaattggtgctacaatatcgtgttttccttccatagaaaaagcctcctgtactaagattgcttttagtataggagactaagtttttgatggctagacgtgtggatacggactgcttacagactatcatcagtaaggagatttttaatttatggcagaacaaaatgaaattatcaccccagttttcaaaaatagaccacttaattttaagaggtatgttttgctgtaaaaacatacatgcgaaagagcaagatttcattgaagcttaattaaaattaaagctagtctcttttttcttgtctggtaagttttttctaggtactattacatagatggagggatttttaaatgattaaagttcgtcaaatatctacaaattcaaatgatttcaaaaatatcaagcgggtttataataccgtatttccacaaaatgaacttttaccattatctttacttaaaatgcgtgctaaagcaggaaaagcagaattttgtagcatttataatgaagagggaaaatgggttggctttttctacacagtctacaacaagcgcatcgcctatattttctttctggcaattgatcctcactatcatggacagggcttgggtagtgcgacgctaaccgcgatcaaagaacggtatgctggaaagcagattacccttagcgctgaacgcccagatcctcaagcacccaataacgaacagcgactcagacggcatcgtttctacgccaaaaatggttttggcaaaacgggtctttataccgttgaaaaggataatgaaaaatttgatcttttaagtatacaatcaagcgtgaatccacaattttaccaacagttaatggatagttatctgactaaccatcgccgccattacttgccgtataaaattgttaaagagtaaaaaaatccccactacctgcatgagtagtgaggatttatttagtttttctgatctttaattttgaatgataagagcagtgccaccacaattaagataattgcaaagtaaatgccgtagtggaaaccattggtaaagcgaatagcttcggatccactaatagaagaactaccccaagccaagcaaccagtagctaaggctgttgcaagcgcaccgataacctgttgcattgtattcatgatggtactgccgtcaccagattctaatccagaaagcgtacttagagcactagtttgtgcaggagacattgctagaggacaaccaatcattaaaatgatatgggcacagattacataaagaagtgcactatgtgatgtagtgaaggccaacatcaaagcgccaaataaagcaaggacaaaaccaattaaaacaggacgtttagccccaatactatcgtaaaggcgacctgcaactgcagaagtggctgcattaataattccaccagggagcattactagtccagtaagggcaacggaaactaagagccctcgttgatagaataacggtaaaagatacatcgtagaaagaataattccaaagtcaagcatcacgattgaagaaccaattgtgaaagccgcatacttaaagatatgaagatttaaaattggttcttccagatgaagttggcgatgggtgtaaaagattaagacaataattccgattattaacgcactgagaactgtaggtgaagtccaaccatcttcactagccaaactagcaccaataacgagccctgaacaacctactgccgattcaataattgagagcacatcaacatgcggcttagtaatttcaccaacattttctaatggagtgatagcaaagatcaaggcaataaataaaaacggaataaataaccagaagatccattgccatgataatttagcaagaattagcccggttaaagtaggaccgattgcaggggcaaacataatcacgagggcacacattcctagaactgctccaatttgtttaggtgggaagatttgcattaccactgcaaacattaatggaagaattaaacctgttccgatcccttgaatcattcgtccaatcaacaaaatagtaaaattatgcgctaaggcagaaatacaagccccaaccatgaagtcaattaatgcaaaaataatgacttggcgggtcgtaaaccatttagtaataatactggacagtggcaagataatcccaataattaacatatatccagtgactaaccattgaattgttgacgtacttacttgaaaagcagccatcaattttggcaatgcaatgtttaatgaagtttcactaaacattccgacaaaagctcctagtagcatactaaccatcatcaatcctggatgcgctacttgcttacgagcttgtaaagcattttccataaatataaaaactccttttatcctaaaaattacacaaggattagtctagcaaatcgtgctatatgctcgtaagttattttttaataactaataatcttaagtatattgattaagattattaagttaggtttagcgttttcaaattcaagcttttcgggataaaaaattctatttagtgataataggaatttaaaaataaatgatttaaaaggtctcacaataatctcaaaatagcgtcgttgcttgtatcctcattttattcctggtagatcagaatagaatataaacagaatatttaaataaataatttgaccacaacatatagtgtttcgaatgtcaatacttcctataagttgtattttgagctatgatagataacgttaattacgagaggggaaataaaaatgaaagtgcaaataattgataagaaggatcttcaaagtttaacaagtgttcaagtagttaaacgtgatggaacagtaacaccattctattcctataagattaaccttattttaaatgcgctcaatgctgatgagcagactagccaaagtgtttatgttaccttattagatgccttgcttaatcaaacaactgtcactactaaaaagattgccgatctctttgttcaaggactggttaatgctaatcatgaagaattggcaaaagtttaccgtgattatcgccaacatgatgaagaagcatttgccgaagctactaatccccaaaataagttagagcagcttttcgaccgaaactcacggattgttcacgaaaatgctaataaagatagccatgtttttaatactcaacgggaccttgaagccggagtcgtgagccgtgcattggggttacggatgcttcctggtattgtagctaaggcgcatcttcgtggtgatattcactggcatgaccttgactattcaccggtaacacctgaaactaactgttgtttaattgactttgatgagatgtttaagcatggatttaagattggtaatgcttgggtttcttcaccacgctcgattcaaacagcaaccgcgcagatgtcgcagattattgctaacgtggcgtctctgcaatatgggggatgttctgctaatcggattgatcaattattagaaccatatgcaaagctaaattacgaaaagcatatgaaggatgccgaagagtggatagtaccagagaaacgagaagaatttgctcgtaaaaagacaaaaaaggatatttacgatgcaatgcaggctttagaatatgagattaataccctttattctagccaaggtcaaactccatttacgaccattaactttggcttagggacaagctggattgcccgggagatccaaaaagccattttgaagatccggattaagggtcttggtaaggaacatcgtacagctatttttcctaaattaacttttactattaaacgaggcttaaatcttgaccctaaagatcctaattatgatattaagcaactagcgcttgaatgttcaacaaagcggatgtatccagatcttttgatgtatgacaagattaaggaactaacggggagctttaagacaccaatgggttgccgttcgttcttacagggatggacagatccagaaactggtaaagaagtaaactcgggacggatgaatttaggggtagtgacagtcaacttgccacggattgccttggaggctcatggcgataagcaattattctgggaaatttttcaagagaagatgaatatttgtaagattgccttggattaccggattaagcgtactaaagaagccaagccagaaaatgctccccttctttatatgtatggtgcatttggtaaacggctaaagaagactgatagtgtcgatgaagtctttaagaatagtcgggcgaccgtttcactaggttatattggtttatatgaagtatgtacgactttctatgggtcaaattgggagcataataaagaagcacatgactttgcaattgcaattactaaggcaatgcatgatttatgcgctgaatgggaaaaagaagaaggatatcactttagtctttattccacccctgctgaatcgttaacagatacattctgccaagatgatttgaagaagtttggtcgggttgaagatgtaacggataaggaatactacacaaatagtttccactatgatgttcgtaaacatccgacaccatttgaaaagctatcatttgaagaggcttttcctaagtatgcggctggtggttttattcattattgcgaatatcccaacttacgccaaaatccaaaagctttagaagcagtttgggactgggcatatgatcatgtcggttatctgggaacaaatacttcaattgatcagtgctttaagtgtggcttcaaaggtgaatttgaagcaactgctcgcggctttaagtgtccgcagtgcgggaaccatgacccagcaacctgtgacgttgttaagcggacatgtggttatcttggtaaccctcagcagcggccaatggttcatggacggcatgaggaaattattcaccgagttaaacatatgaatgctggaatgatcaagaatgcagctgaatttgaacaacagcggcaaatggataataaggctcatgctcatattattggtgatcaaatttaattaattatcaaaaggccagttgcccgtaaagctaccggccttttattatataggaggaaaaagaaatggcagaaacacgattaccccgcaatcctaagttgcaagagtggttagcaaaagatcattcattacaatatattgcagactataagcccttcaattttgttgacggggaaggggtccggtgtagtttatatgttagtggatgcctttttaactgccccgaatgctataacaaggcggcgcagaattttcattatggacagccatatacccaggatttagaagaccagattatcgaagacctttcgcagagttatgttcaaggattgactttattgggtggcgaaccattccttaatactcaggtttgtctgaagttagttaaacgggttcggaaagaattcggtcacgaaaaggatatttggtcttggtctggttatacttgggaagaattaatgaaggagtcgagcgataaacttgaacttctacactacctcgatattctagtcgatggtcgattcttgctggctaaaaaggatcttacccttcagtttagagggagttctaaccaacgaattattgatgttccgcaatcccttcaaacggggaaagtggttatttgggataagcttgttcattagaggagaaaatgatggcaaaaatttggaagaaagagccagcatggttagagaaaaaacgtcaactagcagttatactgcaatcacggtttccgactttacctggtcaagaagaatggatagatcactggcaaaagagaacaactggtgtaagtaggggttggctttctttacaggaagatagcctaactgcgatgcctcttgaacaagcggttaatgaatactcaacactattacaagaaaatttaatggagaaggccatcttttggcaggataaccagttagcggccatgcatcttgcaaatattgactgtggacagtttatatatttgcgtccacaaattactcaggagcgtccaattgtctttagtccccatcttaactctgcaaacacccataatattattgtcatcagtgcggaggtgaatgcggtaattgaagaacggatggttaatgatacgttattaccatcatatgaaggaacggagattttagttggagctaacgcgcacgttacgtaccggcaggcaaatcgctcaactagtaaaaatatctatcggacaatccatgcataccaagcccatggttcaacgctgcagtttgaagtagcgagtcaagttcaaactaaagctactgtcgatctttatagttttctggatggtcaaaatactcagtggacccccacaattgctttaagcggaacgcagcagttaaccgcaatggttgatggttttggtaaggaaacttctgccactcttacccaatatcgggattcagaaatggtcactggagcaccttttaaagtaaaagccggcgaaccactcccaattagcgaagatatccatccattaaaagaattagctagtagtgagcgttggctaaaacaaataatgactgctgaatagggctaaagttaattacagcaatgttacaattaaacattaataacgaaaaataagtcgttgaaattcttctttataagaaaaattcagcgacttatttattattatgttacaaattttggctaattctggggaaaagttagccaaacctaagttactatcaggacgtggccgaggttgatttgcttgacagactattaaaatttttattacaaagtattacgaaaatcaactgaattgatatttcggagtaatccgcatgtaattttggggagtatagtaataggtgttgagagatatgaggactcaacaacttaaactaaattaaactaataaataactaattaataaaaaagtattttatgaaaaggatgggatttttctttatgaagttaactaaaaacatcgcgaaaatcactgctgccgttgcaggtgctgttgccttgggaacattcgctactgcaactactgctaatgctgattctgtttacacggtgcaaagtggtgataccttatcaagtatttcctataagttaggccatgacttaacttatgttgactctttagcttcaactaatcaaattgccaataagaacttaatttatgttggtcaaaagttagtaattaaagatgacggtgaagtaacccaagcaactgctcaacaagctgctactttacctgaagcatctcaagctccagcatcagctagtgttgaaagtcaacaacctagccaagctccggtggttgctagtcaggctcctgtagcaacaagccaagtacaatcatcagctgcaccggtttctgctcctgctcaatcacaggctccagtacaatcagtatctccacaacaatcaactgtttcagctgctgcacaacaaagctacagtgcaccagtacaagcacaagctactagttcaaactacagctcaaatgttagtggtaatgatgcggctgctaaggcttggatcgcagctcgtgaatctggtggtagctacagtgctcgtaacggtcaatacgttggtaagtaccaattatcagcatcatacttaaatggtgactactcagaagctaaccaagaacgagtagctgatcaatacgtagctaaccgttacggttcatggagtgctgctcaatcattctggcaatcacacggttggtactaaaatttaataattaattgttaaagtaggaaattgtctcaataaggggatggtttcctattttttgtaaaatgaaaaaaagttaatattattttcatcctaatcttaaaaaatatattataatagagttattcaagtgatgaaaggatgagatccatgtcaaaagagagtaagattattgatacaaaatcattatatgtaaatcctgaccgcggtgttgcaacgttaaactatagtcaaaattactttactgatattacttcattaattaatagtgatgaagtaaaggaaattgtccgtttatatttagcttcacgtaaccctgataatgatgatgatgcttttgataatgccactgttaacaagtttgttgatatcttaaagaaagttctttttgaggatgatagtgcatttgatgaatatgaccctaaagatattcttgagagtgttgaagaattatactcatactatcgttcactattacgggtatcggtaattaatcttagtgataataagattatcggtaacgagttccggactattgatacccaattcaacgacttagtgcgtaaagcataccggatcctcgaagaaaagctccaaggttttgaaaaccggacttatcgacaagttaatgcggcaactaacgcaacaattttagttcaacaacaagattggaaaattccagctggttatgaagaattaaaggatattgattttattaataccgtgatgcttcgtccaccaatgatgatgcatactaagagtaacaaacgggaaggggtcttttctgaagtaaaagataacccaatcgaacgttttcgtggtgaacgtggtaagtggtattgttacccagcaaagattggtgaaagtttagcctttatttacttcaatgttgattacttggtaaacggaatcgctctttcaaacttatttgaaattgcatcccctgatgagattaaggggcaaaaacctgatatgattcttcttttcggtctaaaagaaacagaaggcatggtttctcattactatcgtgacgaaaagaatgatttgtgggttggtgaagtaccttacacagataagactacttactttggttacatgaagaagatgtgcttgacgctccataaccttcatcaaatttacaatggtcgcctgccaattcacgggtccatgttgaagattaaatttactaatggtaaagaaaagaatgttgttttcttcggtgattcaggtgccggaaagtcagaatcaattgaagcattacaagaattagctgacgataagattgtcagcatggagacaatctttgatgacatgggaagctttacccttactgatggtgaaccaggggtatatgctcaaggaacagaaactggtgcctttgttcgtcttgatgatttgagtagtgccgtggccttcaataacatggaccgtggtgtttaccttaatcctgaacagaagaatgcccgggttattattcctgctgatacttacgaaaatgtaatcaaacatcaccatattgatatgtggctatacgctaacaattacagtgatgaagttggtattcatcgttttgatacagaggaagaggccgaaaaagtatttattgctggacaacggaaggcccttggaacaactgatgaagttggaatgagcaagacattctttgctaacccatttggcccagttcaagaaccagaattaactaagccgattattgacaaggtctttacaaagctatttgaccaagatgtatacgttggagaaatctttactcaccttggtaatgacaagtcaaaggatgctttgaaagaatcagctcaagaattgcttgatgttttgatgaataattaagattacgattaagacaattttgtcatcgccctgtaacaaacagtccgttacagggcgatttttgtgtcgtcaagaaaaaatgagcagtttttttgaataatttttacatgagataattctagttataattttacaagttacttaaaagcgattaaatcaacgtttaagcgactataaaaaaatcagcgaacgtttgttacaaaaaattacagaaataacgaaatttgataagtcctagtaacccgctcgtaaccctaatcctgtatagtagttatcgttgaaatgagttatttgattaattaagagaaaaggacggattgaatttataatgaagttatctaagaaagtagccaagattacagcagcgattactggtgcagttgcattaggaacagtagctactgcaacgactgcaaacgccgacagtatttacacggtgcaagcaggtgacaccctttctgggatttcttacaaattaggtcacgatctaacttttgtagatacattagcaaacaacaataatattgttgataagaacttgatttacgttggtcaacaattagtgatcaaggatgatggtgaagttgcaccagctactcaagaagaagttgctactttaccagccgcaaatgttgcaccacaagctacacctgctgaaaatcaagcacaacaaaaccaacaagtacaatcaaaccaagaagcaccagttgctcaacaacaagtacaaactccacaaacacaaaatgtacaacaatctagtgctcaagcatcaactggctataactcaaatgtagttggaaatgatgctgctgctaaggcttggatcgcagctcgcgaatcaggtggtagctacagtgcacggaatggtcaatatattggtaagtaccaattgtcagcatcatacttaaatggtgactactcagaagctaaccaagaacgagtagctgatcaatatgtagctaaccgttacggttcatggagtgctgctcaatcattctggcaatcacacggttggtactaaaacaagatttaataaaatagataatcaacaaatttcaaacatacgataaaagaggttagaaaaattttagtttttctaacctcttttcgtttaactattataaaatttagctcgtttttcttatacttcaacattagcaacaagttcaattggacagtgacttgaacctttgacatctgaaagaatcttggcttcttcaattcgttctttccatacatcagaaactaagaagtagttgagacgccaacctacatttcgttcccgtgcgtcataacgataattccaccaggtatatgcaccatgcaaattagggtggagataacggaaagtatccgtcaagccagcattaagtaatttaccaaaatcagctcgttcttgttttgtaaagccggcttcatgatgatcttctgttggctctgctaggtcaattggttgataggcaacgctcatatcaccgccaatgattactggcttactactttgcaaattagtaacataatcaaggaaagcgcgatcccagtcgagacgataatcaagatgttgcagcttttcacctgaaactgggacgtatacatcaatcaaatagaagtttggatattcgagcgtgattagtcgcccttctttatcaaaaattgaattattcattccgtatataacgttttctggcttatatttagtgaaaatggcggtaccagaataacccttcttttctgcataattccagtattggtaataatcaggaatttgaatcggttcttcgcctttatccaatcgtgtacattgtagacagaagaagtcagcatcttggcgtttaaaatcttcgacaaatccatgattaatggctgacttcaagccattgacactccaagaaataaatttcatgttaatccttctttcaatttaaccaaaccatgtctctgtaataattgtacaaggaatttgatttttcattaagtaataagactctttttgtgatttttgatacaaaaactgttgtagatgttaaataaaaatattcatattatatatacgaaaatatcaactttaagaataaacgatgcaatatattaaggggatcgcctacttatatcgaaagcgtttatataatattatttatatataaagttacgtttatcacaaaattgtcaaagagtcacaacttagaggagggtgtctaatgacttcaaagtatgaaacagagtcgaaaggttacacgatgacaaccgtaatgcaggaagctgcacgatgtttattatgtcatgatgcaccatgttcacaagcttgcccagcacatactaatccagcaaaatttattcgaagtgttctttttcgtaatgttaaaggggcagctgaaacgattcgggaaaacaatgcgttaggatcaatctgtgcgcgtgtttgtccaactgagcgttactgtgaaaaggcatgtacccgggctaaaatcgacggaccaattgatatcggtgggattcaacggtatgtcactgatatggagcgaaagatgaatatgaagattcttaaagctggtaagccaaacggaatgagtattgccatcattggtagtggcccatcaggtttacaggcagccacgactcttcgtgaaaagggctatgcagttgatatctatgaaaaagctgctaaggctggcggttacttgacctacggcattcctgagtatcggttgccggaagaaattgtggattatgaagttcaacgaattgtcgaccttggtgcgcacattatctataacacaactgtcggaaaagatatttcaatggatgaccttaaagctcgttacaatgcagtaattgttgctattgggacaagtgaagcaaagatgcttccaatgtttgaacacaatatctgtactgaatcagcaatctcattcctagcccgggcaaaaaaaagtaagggtaatttagaagatcttccgcaaaatgtccttgttattggtggtggggatgttgcaatggatgttgtaacaaccttaaagaagcttaatgttccttatgttaccgatgttgtttatgagcagtttgatgaattcaaagcttctaaaaaggaacttgccggtgctcaagaagctggtgtaacaattgttgatggttacgttccaaaagaagttcatcagaatcgtgctacctttactcaccggaagattaagagtgaattaactattactgctgataagattattttagcagttggtcaaaaagcgaatgcagaaggactagacattgacttacagcataatgaaattccattccgtgaaccacgattccggacaaaagatcccaaagtttttgcgactggtgatattgttgccggagataaaaccgttgtggtagcagtacagaaaggaaaagaagtagcagaagaaatagaccggttgttaggaggacaagaaaatgattaaaaaagatttatctgtagactttttaggcgttcattttgaaaatccattttgcttgtcgtcctcacctgttgggaactgttacgaaatgtgtaagaatgcatatgacgctggttggggcggtatcgtatataagactttatcaccaacacactttaagattgatgaagtttctcctcggttcgacgaattagccaaggaagacatgcattttgttgcctttaagaatatggaacaattatcagaacaccccttggagcaggacttggctgatatgcgacggttaaaagaggaatatcccaataaagtcttgattgcttcaattatgggtgagacattggaagattggaccaacctggctaagttagtaactgaggcaggggctgatatgattgaattaaacttctcttgtccacagatgacttctcataccatgggttcagatgtgggaactaatccagaattatgtaagaagaattgtgaagccgttaaacgcgggactagccttccagttcttgcgaagatgacaccaaatattacgacgatggttccgattgttaaggcatgtctagaaggaggggcagatggcttctccgcaatcaatactgttaaatcaattgttgatgttgatctgaagaagaaagttggtttaccaaatattgatggtaaatcttctgtttctggattatctgggaaagctgttaagccaattgctttacgtttcttacaacaattacggtcagcagccggccttgaacaactaccgatttctggaattgggggaattgaaacctgggaagatgctgctgaatttattcttttgggtgccactactctccaagttacaactgcgatcatggaatatggttatcggatcattgatgaccttactaatggtttaatgcattacatggaagaacagcatgtagaccaccttcaagatcttgtcggcttagctaataagaatattattcctactaatcagcttgaccgaaattacaaggtttaccctaagattgattgggataagtgtatcggttgtggacgttgctttatctcatgtcaagatggtgctcaccaagcattaacttgggatgatgaaaaacggcaaccagtttttgataagagtaagtgtgtcggttgtcaactgtgtgcacttgtttgtcctgtgggggctattaagttaggccttgttgagattaagccgggccacaaaggtaatccagcagaaatcgatgtaggatctcaacgtcttcatcgctatcacccggtaaaggctaatcaagaaaattaattattagttttcctcatatatgaaaaatcgaactgcaactttgtgaaatgcaaaattgtagttcgatttttagctttattatgtcacattgtaactcttaaattactgcgaggggtacttttttatttggtgatgggaactctttttgtaaagcaagtaactcatcatcacttagttcaatgttaccagctgcaacattttcttcagcatgttttgggctgctgctctttggaatagcaaggatatttccaattcttaagacccatgcaagcatgatctgactaacggtcatatggtggtttgcggcaatttcttttagtagcggattctcggttaactttccagatagactgtcaccctgtgcaaggggagagtaggctattaatggaagctgatgctgtttcattaagggaaggaggtcaaattcaattccgcgactatcgagattatagagatcttcgttggcaacgcaatcagtgccatttttaaggcgccataattcttcaagatcactgacgtcgaagtttgagactccccatgctttaatctttcctgcctttttaactctctctaattcgttgactgtttctgctaacggaatcccaccccgccagtgtaaaaggtaaaggtcaaaatagtctgttcctacggcagctaaactttggtctaaactatgctcaagttttgtcttgctggcatttgaaggaagaactttatcaattaagaatagcttttcccgactatatggtttgatggcctcagcgacaagtgcttcagaacgaccatcgccatacatttccgcagtatcaatagcttgtgcgccaacgtcaattgcagtttgaatggctttaatttctgtggaccgattgacgagagaatttcccatattccatgttccgattccaattgcgggcattgaaacatcattgattgtgacttttttcatcttgcgcggctcctttctattttcctacttctattatattctttttagtcaatggtccctagcatattagttgcattttagttgaaagcgtttaacatagacaatgaataagaaagaaaggaagcattctttatggctaatgaattacaaaaccgtaataatttattcgatagtttgatgaacatgcgtaactggatgaacgatgatttcttctctaacctaactccggttgctgatcacatgaagacagatgttacagaagatgacaaaaattataccgtaaagattgacatgcctggatttgataagaaggatattcacattaattatgccaatgatattttgacagttactggtcatcgggatatctttgatgatgatggtgataaggatggcaatgttctgcattctgaacgtcggtatggccaaatgagtcggcaatatcgtttaccagatgtaaataagaaggatatcaaagctcaatacaagaatggtgttttgacaattactcttcctaagaaggatgagactgatgacgatgaaaatcatattgatattgaataattaaattaaactgagtaaagagttgtggaaaattactttctgcaaccctttatttttcatccgtttcttgaacatatgtttgattgaagatataatagtatttactgaagtgctggaggtattctcatgatggggcgaacatatatggcaatcgatttaaaatcattctatgcctcggtcgaatgtactgagtgtgggctcgatcccttaaacactaacctcgtagttgccgatgaatcgcgaactagtaagactatttgtctcgccgtctcaccagctttaaaaaagtttggcgtttctggtcgcccgcgattgtatgaggtggaacaacgggtagcgtacttgaataatcgtcgtgccaaagaaatgtctcaccagcgattatcaccagttgtttcaatttaccgggatgaactattaaaatcaccggaacttaaaattggttatagtattgcgcacccacgaatgaatttttatcttgaaaaaagtgccgccatctatgaaatttatttacgctatttaccaccagaaaagatccacgtttattctattgatgaggtaatgatggatattactgattatcttaataagtaccatgttagcgcccgttctttagctaaggaaatcatccaaacaattaaagcagagacacaaattactgcaactgcaggaattgggaccaatcttttcttagcgaaagtagcgatggatatagtagctaaacggattccaggggatgaagacggggtccggattgcacagatgaatgaacatacttttcgtcgttacctttgggcgcaccagccactaacagacttttggcgaattggtcctggatatgcgcgacgactaaaaaagctaggtcttcatacaatgggagatattgctcgttgttctttgggaaagttatctgatccaatgaatgaagaagtattataccgcgaatttggaaaaaatgcggaaatcattattgaccatgcgtggggatatgagtcagccaccattaaagatatcaaaaattatcattcatcagatcatggggtgtattctgggcaggtgttgcctcgaccttataactttacagaaacccggttagtgattcaagagatggttaattcattagctctccagttaaccaagcaaaacttagtaactgatcaagtagctttaagggtcgcctatgatgtttctaatatatcggaggattaccaaggaccattagtgacagacttctatggacgccaggcgccaaagccaatgcatggaaaagctaatctttccttaccgacttcatctggtacagaattgatggaggcatttatgaagttatgtgattctggccttgaccggcgattgacagctcgtaaaattacggtaatagcgaaccaccttctctcaccacggcttgccagattggcgaattataatgagcagttagatttatttacggattcaacgaaaaaacataagaatcgttccaaagttcaagaaaaggatcaaaaactacaaagacttgtccttgatttgcaaaatgagtacggtaaaaacgccattattcgagcggcggatttgaaaaaaggtgctactcttttggaaagaaataatcagattggagggcaccaagcataatggaaaatgaagatttgctgaaaatagaaaaaagcttgtttagtgatacctcaaagtatcgtgatattatcaacacccctcggcatgtttctcaagctcatacgccaatgaccaccgaagatcgcgctgctcagttttctccttttgcggccttgaccggctaccatcaattattagcaaaggtaggggaaaagtatggtcataagacttatcccacagctgagatgaggcatcgaattagagtccaacttgccatgattgaacggggccgatcacatccgttaataaaagttgaattctttaatggtaagactggtttttatgaagaatacacggggcaattaaaacgaattgatcaccatgctcaccacctaatatttgatgacggaacaaggcttataattcaaaatattcgtaaaattaaaagaggtcagcaaaactgatctcttttaatataaggtatacgttaaaatgcttgaataagtttcatgattccgaacacaatcaagaatgttgaaactaaccataccactgtaatagcggaaagtaatgggctaaataaaagaataactcctaataccaaactcaaaattgctagaattacaatgaaccagtagtatccacgatgaaattccttgaaaaacttcgcactgatcaactcagtgatagaatcaaggataaaccagatagcgaagatgatagcaatgaagagtaccccaaagcttggttggaaaagaaaaataattcctaaaatgatatctaaaattgcagaaaaaattaaccaacctgaggattctcctaagattcgaccgattcgttgacggaaccataattcataaattccgcggaaaataaaagtaattccggcaacaatggctaagaagtgaagggttttatctggccgcgtgaatgatgcaattccggcaatgataaataagaccccaacaattaggctaaaccagtcaaagccctttttagtttcttcaaacattgaaaaacctccctaaaaataaaattattaatatcatagttcaaatgggttaataaaacaagaagaaaggaaatctcaacaaggtagtataatacatataggatgaaatagtaaacaacctaagattagttcaggataaaaataattattgtcctggacttttttgttattctgaagatagagctaagatcgatcatgctcccagggacttcgagtccgtattataaaatgatctccgctatctttgatttgatattttgcttttaggttgtggaactacgagttcgagtatttaggaaatgaagtacaaatctaggatagcggttatatctagctctatttatagaaaggaagtttttttatggctgatatatttgccttggatgtttcaatggggaaaagctactgtgtctggtatcgagggaaacactgtttaaaggagttttctttagtacacacgaaagcggggtttaatgctctacgagatatgattaagaaagctcagaagtcaattatctactttgaagcgactggaatttattcgcgagtaattgaacatttctgtgagaccaatggtctccgcttttgccgtcttaatccgctagaacttcatttaaagtccgagagtctacgacgagttaagaccgatcagaaagacgctcaccggattgctctcactgtccaggaaaatacttttcgattaatagttccttggaaaaaagactatcttcagctacatgagcttagtcggttctataatcagctcaatgctgattggaactatcgtctaaatcatcttcatactgcacttgaacaagtttttccagaacttaagcaattatttgtaaatagaacatctaaattagcgttgaatatcgtggagctttttcctcattcagcactagttaggccttattcgagagttaaattaaagaatattctaatggcatctacagataaacgaatatctaagatgaaagcttataagtatgccgatcgattaatcgatctcgcccaaaaatcatatccggctgtttctggtgatgccattcaggttgatgaagttcgctactatgctcgccaattaattgccttaacccgtaaaagggaagaggttatcaagcggatggaatctattgcccagcgcttaccagagtatatcctatactgctcttttccgggaattgggaaacaaactgcggctcagttaatgggagaattgggcgacattagtcgctttgacaatgccaatcagcttaatgcctttgtcggaattgatattcgtcgttaccaatctggaacctatttaggtcaagatcacattaataagcgtggaaacccgattgcccgtaagctcttatattttactgtaggtaatatgatccgccaacaacacgctaattctaatcatatcgttgactattactatcgtttaaaagaaaaacgacctcatccaaaactgaacaaggtcgccatggtagcttgtatgaataaaactctgaaatgtctcttatccatgattaagcaccatgaaaaataccactatcggtatacggactcaatggtccctgtgaaggcataatcacctcacaattttaatataccactaattctcgatttttgaagaagaaccgagttggtttagtatactcttcttttctaaatatttttcttgactaatcgtaggaaagggagcgagacagaagttacttgtgactttgttttttgatgcgaagctagcctctgggagcccccgcaagcaacaataggccttcagcgtccggcaaggtcgaacgctgaaggccattgttatactgcgctgttcgtattttgtggaagtgacctaacttatgtcacagctccttttgtcgtaatttcccgggaaattaaaggtgctctttaataccgttgggaaaatccttatcaatctcctttaagattggtaataatgaattgacatattcatgatatgcttcgattggctttagatcttttgctcgggattgtagtaaggtaagagcaatatcatgcgctctttgttcatttgtaatcatcttttaccacctcagttattcagtttatcagattttccacctactagcataaattgtttaataacttgatgaaaaatcgtttgatcaagtataatcattactgcaaaaccaattgtagttccgatggtattgctaatcaaatcatccacatcggcaacccttccaatatggaaaagaaggtcgcaaacaaattggttacactcgataaataagctgaagaaaaagccgtaaagaatagcacgactgaagggcatttggtgattaattaaataaagataaactcctagtggtaaggtcatcacaatatttaagaaaaattcttggctgagtccttggagggggatgatattaaatggtacgccgtgaaaataaaataaaagtttgttagcagaactaaaattaaacattgaaggggttagacaaagccagtcgatagcagttaaatagataaaaaaggttgcaattgtaatatgctggctgaagttaggaaatttttcccaaaggtgattatgggtaacgaggacagatcctgcaaaaaaataaataaaaaatgggatccagtgaactaatgcgtacaatgtaatttctccttctacgaaaaatggtatacaataggttttcaatgttatatatcatagttgatttttttagtaatgactagtaaacctaactaggattaataaaacttcaattattgagaaagagagaggatcatggcagaaaaacaagaatttacacgtaagcttaaaagccgtcatattcaattaatggcgcttggcggaacgattgggacaggattatttcttggatcggggaaggcaattcacgctgctggtccagcaatccttttagcatatttaattactgggattatttgttttggaattatgcgggccctgggagagttgcttctttccgacttacattatcattcgtttatggatgcgattcgtgattatcttggtaatcgcgtgagttttgtaatgggctgggcttattgggtgtgttggctagcattggcaatggccgaagttaccgccattggcttatattttcaactatggtttcctcaagttccccaatggttacctggattaataactctcctaattttattgggattaaatctaatgactgttagtacgtttggtgaactcgaattttggtttgcccttattaaaattttggcaattgttattttaattgccgttggtgtcattttagttttacttcattttcattcggtaagcggctatctcgctactcctgctaatttagttaatgatgggggcttttttgctaccgggacaaagggcttcatgctttcttttcaaatggttgtatttgcctttgttggaattgaaatggtaggggtgacagcggctgaggcagagaatcctaaagttgttattcctaaggcaattaatggtattcctattcgaattatgctcttttatatcggtgctttggctgtcattatgtgcatttatccgtggagtaaactttcaccaagcaatagtccgtttgtccttgtttttcgcgacatcggtcttccgggggctgctagtatcgttaattttgtagtaattactgctgcggcttctgcttgtaatagttctctatatacaactggtcggatgctagctgagttaacctctactgctcatcggcctgttatccgtaagattagtcgcttatctaagcggtcggtgcctgcaacagcggttattatttctgcagtcgttattggaattgccgctatcttaaacttagtaatgccagaaggagtttttacttttgtttccagtattgctaccacgagttttctctttgtatgggctgctatcatcttggcacatttaaaatatattcgtcagcatccgcaatcaaggacttttaagatgccaggcgcaccttttactgactatgttattttagtttttctttttattgtgctaattgttttatgtatggagaaacaaactttaattgcgcttatactgacattggcttggtttgcaattcttgccgttgcttcattaacacaaaagaaagcataaaaaattccccgagttttcggggaattttttactaacgattcaaatgtaatttacgttgacactcgggacaaatgccatggacttcgatgttatttcctgtaactagatagccagtcttttcatgagtcataaccgttaattctttcgtgattgcagtaaaatgttcatcaaaaacatcagaaatcttaccacaattatcgcagacgacatgataatgcgggtggccgaaataatcaaagtgggtactgccgtctccattttttagctcaattacgagattataatcaacaaagagttttagagtattgtaaacagttgccatactgatattgtcaactgtgtctttaaggtcatcataaatcatttcgacacttggatgagtatgatgattgattaagtaatttaagatagttttccgctggggagtaagacgaaccttgttttcacggagatggtcaagagctcgatcaaattctgcttctgccataatgtcgtcccctttcttaaaataattataatctattgacattataacatttacattcactaattcaaaacatataataattaacggtcagataataactattctaaagaaggagagaatgatatggatcaaagtatcgcacgcaatggaaaaagttatagtcgcttttggtttatttttactttactagttggtacctttacgatgtcgattagtcaatcatcgttgtcaactgcctatccaactttaatgaacgcttttgggatttcagcatcaaccgttcaatggctgacgactggttttatgctcgtaatgtgtgtcagcatgccaattagcccgtggatgctcaataatatgagttttaagacaatgttcattggggcactgggactatttgatattggatccttgatgattgttttaacccccgcgtcttggggaattaatggtttctggtttatgatgattggacgggccatggaagcttttgccgttggagttttattcccatcataccaaactgttttgcttgagattacgcctaaagaagagcggggctcaacgatggggattgctggtttggtaatgggatccgcccttgcctgtggaccgattgtttcaggaattgttctaaagttctttagctggaagagcctttttatcctcttcatgcttgttatttccataattattttaatggctgctagcggactgatccaagatgtaatggaacgccatgaaacgaaccttgattggctatcagtaattttactagttggattaattgggattatgtacgttgttgaccaaaccggaaaaaagaatcttgcatgggaaataaatgcagggatttttatcgttagtcttattgcggttatctggttctgcattcggcagcttcacctcaagcacccgctattggaattacgggtattgaagacttttaattatgatttagcaattcttttaacgtcgatttcatatattgccttaattgtaacgacaattatttttcccctctattatcagggagtattaaaagttagtccatttgtttctggaatggccctagtgcctggagctgtttttcttagtatcctgaatcctttgtcaggaaaattggctgataaaattgggtttaaaccgacaatgctggtgggaatgtttatgattatcattggttgggttgctggattaatcgtccttaatcatctcagcttattgggaatgatcctttgcgcaatggtgattgaaggtggaaatgcctttgtaatgatgccggccgtcacactgggagcaaatgccttacctgatgaattagtacctcacggaacagctgtaattacaacagtccggcaagttctcgggtccgcgggtgttactatttcaacactgatcttaacggttgctactacaaatgcacttcaacggggaagttcggcgcaagtagcttcccttcacggctatcatttagtatttattggcatgatcgtcactgaattgattggtctcgtactagcatttatgctaaaaaatactaatactaataaggaaaaaagtacaaaataaccaaaaattcgtatataaatagggagaagaaaatttctgctccctatttattttgaaaacaaaaaagaggtattgataatgacacttaaacgaccacaatgggcaaatgcgacaccagaaatgcaagactattatgatcactactggggatttccagttcatgatgaccagcagttatttgcaatgctatctttagaattatttcaggctggtttaacttggcagacaatctggcggcgacgggaagcatttaatcaggcattcgataactttaatattgaaaaagtggcatcatttaccgatgaagatattaatcgattatgcgaggatgaaactattattcgtaatcgtcttaaaatattagcggtaattaataatgcacaagtgattttaaaattacggaaaacgggaaagacgtttgataattatgtgtggcgctttgttgatgatcagcctcaagacttggggttaactaccgatattgaattagctcctaaaacgcctgcttcggaagaaatagccaaacaaatgcggaaggatggatttaaatttgttggtccgacaattatttactctttcatgacagcggtggggatggtcaatgcccgtttaaagtaagaatgtaaggattaacattgattgttggttgacaattatgctaagattattctcgttataaagcaattcccgataggattcacgtctgaacgtgaagatgccttgtaaccgcaactacaaactatttgaaagtttcaatagaatatgggggaattagaaaatggcagaacgacatttatttacatccgaatcagtatcagaaggacatccagataagattgctgaccaaatcagtgacgcgatcttagatgaattgcttaagaaggatcctgattcacgggttgcagttgaaacctcagttactactggactagtattagtctttggtgaagtttctactaaggcctacgttaatatccaacagattgtgcgggacacaattcgtaagattggttatacagatggtaagtacggtttcgatgctgataattgtgctgttatcactgcaatcgatgaacaatcaccggacattgcgcaaggggttgatgactccttagaaacgcgtgaaggtgaagctgatccgcttgataagattggtgccggtgaccaaggattgatgtttggttacgctactgacgaaacacctgaatatatgccattaacattggttttaagccataagttaatgcgtaagattgctcaactacgtaaggatggcgttatctcttaccttcgtccggatgcaaaggccgaagtaactgtagaatacgatgagaatgacaagccgttacgtgttgacaccgttgttttaagtacccagcatgatccagaggtttcgcttgatcaaatcaagaaagatattaaagaacaagtcattgaagcggtcattccagctaagtaccttgatgatcaaactaagtacttcattaatccaacaggtcgctttgtaatcggtggaccgcaaggggatgccggcttaacaggacggaagattattgttgatacttatggtggggctgcccatcacggtggtggagccttttctggaaaggatgctactaaggttgaccgttctgctagttatgctgcgcgctatattgctaaaaacattgttgcagcgggctatgctaagaaggccgaaattcaagttgcttatgccattggtgtagcagaaccagtatcgatcatgattaatacttatggtaccggtacccgttcagaagaagaattaattgccgctgttcgaaaagtatttgatttacgtccagctggaattattgaaatgctcgacttgaagcggccaatttacaagcaaactgctgcttatggtcactttggtcgaactgatgtggacttaccatgggaacaccttgataaagttgatgaattaaaagaaattttaggctaataatttagttacacgcttgcaatcattaacggtggttgttaaaataggcgttaaatatttgatcgtaatagaaatagtagtttttgacgagggcagcagagatcctgtggtggtgtgaacaggagactggtcatttacgaactcatctaaatgtgattattactgaatcttagtaggtaatgacgtttaccgcgttaaggtcctaagcgccatggcttccatggaaaacgggtggtaccgcggagttatttcgtctcgtagattgatttctacgggacttttttattacgatcatcaaaatcagaataaggagtagaaaatatggcttacgatcataagacgattgaaaaaaagtggcaaaagttttggaaaaagaatggaacttttaaagcagaccttaataaggatcaaaagaagtactatgcactagacatgttcccatatccatctggtcaaggactccacgttggtcacccagaaggctataccgctacggatgtaatgtcacggatgaagcgaatgcaaggatttaatgtcttacatccaatggggtgggatgcattcggtttaccagctgaacaatatgcattaaagactggccataaccctaagaactttacgaacaaaaatattgatcatttccgtgaccaaatccaatcacttggattctcatatgactgggatcgtgaagtaaatacaactgatcctaagttctacaagtggactcaatggatttttgaacagctctacaagaaggggcttgcttacgaaagtgaaattatggttaactgggcccctgattttatgggtggaacagttgttgccaacgaagaggttgaagatggcaagactaaacgtggtggctaccccgtttaccgtaagccaatgcgtcaatgggttttaaagattactgcttatgcggaccgtttgattgatgaccttgaccttgttgactggccagaaagcgttaaagaaatgcaacgtaactggatcggtcgttcagaaggtgcttcagtatttttcccagttgtgggggatgaagatactaagattgaagtatttacgacgcgggcagatacgctctttggtgcttcttatgttgttcttgctcccgagcaagaattagttgaccaattgacaacaccagaacacaaggcggaagttgaaaagtacaaggaagaagcgtcacggcggtctgatcttgagcggactgacttaaacaaggacaagactggtgtatttactggttcttacgttattaatccagttaacggtgaaaaactaccaatttggattagtgattacgtgcttgcttcatatggaactggagcagtaatggctgttccttccggagatcaacgtgattatgactttgctactaagtttgacttgccaatcaagcctgttattgaaggaacagatgtgtcagaaggtgcttttgatggtgacggtaagcacattaattctggtttccttgatggcttgaacattgctgatgcaaagcaaaagatgatcgattggcttgaagaacacgatgctggtcataagaaagttaactaccgtcttcgtgattggatcttcagtcggcaacgttactggggtgaaccaattccagttatccactgggatgatgggacaacctcattagttccagaagatgaacttccacttgaattaccaaagactgataacatcgaaccatcaggaactggtgaaagtccattagcaaatgttgaagattgggttaacgtttatgacgaaaatggtcgtcatggtcttcgtgagactaacaccatgccacaatgggccggttcatcatggtactggctccggtacactgatcctcataatgacaaggaatttgcctcaaaagaagctcttgattactggtcaccagttgatctctatgttggtggagctgaacacgctgttcttcacttgctctatgctcgattctggcataaggttctttatgacctcggtctcgtaccaactaaagaaccattcatgaagcttgttaaccaggggatgattcttggttcaaaccatgaaaagatgtcgaagtccaaaggtaatgttgttaaccctgatgacattgttgaccaatatggggctgatactttacgtctttacgaaatgttcatgggaccacttgaagaatcggtaccttgggatgaaaaaggacttcatggtgctaataagtgggttcaacgtgtatggcggttgttgatggatgataataaccacctccgtgaccgggtatccactttcaatgatggtaagcttaccaaggtttacaatcaaactgttaagaaggttaccgaagactacgaacggatgcacttcaacacggctatttctcaattgatggtctttgtaaacgaagcctacaaggttgatgatttaccagttgaatacatgaaaggctttgtaaagatgattgcaccaatcatgcctcacatggctgaagaactctggagtcaattcggtgagagtgatacaatcacttaccaatcatggccaacttacgatccaaaagctttagttgaagatgaagttgaaatgatcgtccaggttaacggtaaggtacgggctaagattaagatggccaaggatactgaccgcgatgaagcacaacaacttgctttagcaaacgaacatgttaagaagtttactgacggcaaggatattaagaaagtcattgttgtccctaacaagatcgttaacattgttgcaaaatagtaaattaagaaagggcagggaatttatgttttcctgcttctttttatttgaggagcagataagttatggaaatagtgagttatccagcaatttttaccccgaaagataatgaaattcaagttgattttccagatttgccggaagcatttacccaggggaaaacaatggatgaggcgatgaattttgctaaattgggcttagcgattacccttaatgataaacttggccactttgaagatgccccagctgtaagttcattagaggcgttaaagcaacaacatccagatcaaatcattaaaatggtaactgttgatttggaacaatactagattaaagaaatattaaaaacggtaaatcgaattgcaccaactttttattcacgataaaatgaaaactcgattaaaataaaaaaggtaggattgcaacaaatcatggaagaaaataaagtaaatgatttgagcagcaccgcagtcaaaaaagattcgcaaacaaaaatgattacaggatcagcttggatgacagctggtagtattacttcgcgaatcttaggggcgctgtacattattccgtgggttacatggttaggagcttatagtaacgaagcgaatgccttatatgctcaggggtacaatatttataatatgtttttagtgattgcaacggcgggaattccttctgcaatttctaaaatggtcgcgcattataacggaataaaccagtatggcgttagtcgccgactgtatcattctggaatgtacgttgcaatggcaatgggtgtaatttgtacgacagtgatgatgtttggagctcgtttaatggataatggagatccaaatatgattccggttatccgctcattggcttgggctattttgattattccggggatgtcaattacccgaggctttttacaagggtataattggatggcaccatcagcaatttcacaatttgttgaacagcttttccgggttatttatatgttggcggccacttatttaattatgaagattcaaaatggtaattgggttagtgccgtttctcaatcaacatttgcagcctttattggggcaattggtgcagtgatcgtcttagggattgcctggatgcgtcaccaacgcgaaatgaatgacttagtggcacaaggtgaagtaaacactgaagtttcaacccaaacattaatttttaagattatttatcaatcaatcccgttcatcattattgaatcaggggtaacgatttttcaattaattgatcaatatacttttaagcggatgatgccattagttggtcactttactaagtaccagatggatgttacttatgccttattcgcgtttaatgccaataagctttacatgattgttatttcattagcttctgcattagccgcaacagttattccgttgcttgcgacagcccgggctcagaacgatcaagaggatatgcgaaaacagattcaaaatgttctcttgttattctattttgtgatgatcccggctgctcttggattatccgcggttgctcagcaaatctacaccgtcttttaccgttatgatgcggcaggggtcgtagtactgcaatttgcggcatacatttcgatcatgttgggcttgtatactgtagccgcagcaatgatgcagggaatttctgagaataagaagatgatgatgtttttagccatcggaattgtaattaaatttatcctccagttcccatgtatttggatctttgaaggattaggaccactggtttcaaccgggatttcaatgtttgtgattaactatttgatcttgcattcctttaatatggaattccacctacgttttgataagatggccctgccaactaaccagattttggcttactccttagtgatgtttgctgggacaaagattgtaatgttaatcattggtcattttattagtccgtatgggcgttacactgctttcttctccttgattccgggggtaatagtcggagcaggaatttatctctatctctgcttaaagtcacgattagccgaccagctcttgggaccacgagtagcaagattacgaacaattttacacattaaataacaatgcatacaaaaaggttcagagtgagaatttgctctgaacctttttaatatccttaaattcttaattcaaaaatccaatatggtgatcttcattcatcccatctatctttttcatgaaggctgggagagcacggctaatttggtggggaaggacgatgtattggctttcggcgatcttttccgcaatcgcactgtgcgcataaacggcagcgaggacggctttatctgccttctcgttaaattcagcagtgaaacctccaaccattccagcaagagtatcacccattccaccaactgcttgggcgggggtaccgattggcaattgatatacttggtcatcagtataaatttctgtgtggtgcttctttaagacaacggtagcactaagtttttcttgggcttccttgttcttatcttcagtttgatcgccaattttaattccagagagtcgttgccattccatttcatgtggagtgtaaatgatatttccttgtggctgttcaagcttttccatcgccatcagggtaattgccgacccatcaatgatcacattttgtttctcggttgtatgagcaaaaacattcttcaaaattcgtaaacttgtttcatcatttccgaggcctggcccaacgaccacactggtagcagctttagtaaggtcagcaactagggcatcatcagtaaaatcagcgaacatcgcttctggcaactgcgcatggagggcactagcgttgatttcatcagttgcagttgttacaagcccagctccagcacagacggctgcggttgatgccatgataattgcgccaccaaaattacgattgccgccgataagggtaactttcccaaaagtacctttaaaactgttttcaggacggggagtaataacatcctttaagatttggtcagtaagttttttcacagttaagactccttattattttatttaatagacaatttaatggtatcattaaaattagtcaaagtagaatattttggagggattaatcttgactgattggatgaaagccgcagaggcgcaaaaagaaaattatttaaatgatctcgtagcattaatgaagatccccagtgtccgtgatgattcagcggcaacagatgaatacccgcttggtcctcgtcctgctcaagcgctaaaagcatttttagagatggcagaacaagacggttttaaagtaaagaacatcgataaccttgttggatatgctgaatggggtgaaggtgatgagacacttgccattttagcccatcttgatgtaatgcctgctggtaagggttgggatacggatccatttgacccagttatcaaggatggcaacttatatggtcgtggtgcttctgatgataagggacctggaatggctgcttactatgccttgaagtatttgaaagatcaaggcgtaaagtttaacaagaaagttcgttttatcgttggaactgatgaagaaagtaactggactggaatgcaccgttactttgaagtcgaaccagcccccacacttggtttttcaccagatgcggaatttccagtaattaatggtgaaaaaggtcaagtatcactcttacttgatgtccctgctggcaatggggatgcttcaacacaactagttagttttgaatctggtttgcgtttcaacatggtaccgcgggaagcagttgcccttattcggacagataatcctcaagaagttacgaatgattttggtcactttattgaagaaaatccggttgaaggtaatattgaatcaacagataaaggtcttaagattactgtcatcggaaaagctgcccatggaatggaaccagaaaagggaatcaatgcagcaacataccttgcaaagttcttaaatcgatatgactttggtgggggcgcaaagaatttcattgaattcttagctgactatcttcatttagatacgcgaatggatggttttaatggtgcttacactgatccagtaatgggcgaattaactatgaatgctggaatcttaaacttcgatgcggacaagggtggtcacattgatatgaacttccgcttccctaaaggcatgacaccagataagttagaggatactgtaaaggcgattgccgataaattacaaattaaagttacgcaaggcccatctcaagctccacattatgttgatccagatgatccaattgttaagacattaatgcaagcttatattgatcaaactggagatacagacgcaaaaccagaagttgttggtggaggaacttatggtcgtttgatgaagcggggggttgcatttggtgctttaatgccacatacgccaaatacaatgcatcaggctaatgaatatcaacctgtgaatgatttaattacatcgatggcaatttacatggaagcaattaataatctcgttactgattaattttgtgctaaaataaaggcagaagatggaggtgtcaagaatgagttatcaaaatattcttgttggtgtcgatggttccaagcaagctgatatggcttttgaaaaagcggttgacactgctaagaccaatgatgccaagttgtatttactaagtattatcaacggtgaacgttatccaagtactggtcctggtggatacggctttgttagtcatagtatttatgattcagcaatcgaaacgatgcaaaagaagttagctgactacaagaaaaagcagaagccgctggaataaaagatgttaaaactgatgtaaaggttggtaacgctaaggttgaacttgcggaacgttatcctaaagaaaatgatattgatttaatcattattggcgcaaccggattaaatgttgtcggacggctacttgtcggttcaactgctgcttatactattcgtgaagcaccatgtgacgttaccgttgttaagacaaacttaaagaatcaaaaattggatatcaaggaaacgacatatcctgaaatgtaaaacataaagactagtggaattttcttctagtcttttttagttttaaaaatgcaaattcataattttcgcgtatatatactataggacattatgaaggagtgttttattgtgttaaaccgccgtgttattactagtgcattaattgttttaacaagccttagcgggcaaccggttaaagcggacgttatccaacaagcacaatttgatgcaaatgaagatgtaaaacgtgcaaagccgattgacgaagaggccttagttaatcatgatgaagaatatattgatgcttatttaacagaatatgaaaatgctgctcaagcaaaggcaagtgagcaaaataatgctttgacaggtacagaggaagcgccagagcatgaaactattcaatcttcaactgaaaactctgctgaacaaaggcagctgctagaagaagataaaaaagatgagcaggtttatcaacctcaacaaccatccgcagtccaagcacaatttattaatcgaatagcctcagctgctcaacaaattggtcgggagcatgatttatatccatcaattattattgcgcaagcggccttagagagtgattggggatgcagtacgttggggaaggcgcctaataataatctttttggggttaaggggtattttgcccggcaaacagttgctcaacccacgactgaatatgataagcaaggccataagtttcaggttattagtaattttcgacagtatgcaagtgaatacgaagcgttaagggattatgcgcaaacattagaagacccactttatcaaggagttcaccgtcaaaataccaaaaattatcgtgaagctacacgggcacttcgcggacgatatgcaacagatcccgagtatgatcggaagctaaaccagctgattgatacttaccaacttactaaatatgataatcaagttaacaccagcaatgaacgggctaatcctgttccaatgactgacaggaaagaggagagtgaggcgatgccaattgttgccaaacatcccgttcaagcgagaaagaacgatgttaatatccctcaatatgttcctttgctcggtggggtagggacggcaggaatgattgaaatgtttcgtcgtttgttgaagaaaaggaaagagcatgattaaaaggcaaacctctaatcatgctcttatcaattatttagcgtaatgacttcaaccgttcatcaatcattgctaagaccgcatcaacgttcttaggatcttcaaggtcataacgctctaaatcaattttcatttttggactagcatcgtaatccttgtaccattgcttgtaggcactccacatcttgtaatagtaatcctttaactctggattagtatcaatttgctcgtaatctcgcccgcgctttttaatccggtataagattgtttcaaaatcagtttcagaataaaccattaagtctggtgcgcgcttaggtaactgttggaggtcactcatcatattgtcgagaagctttaagtatacttctaattcagtatcagtgatgttaccctcggcgttattttctcgcgtaaacaaggcatcttcgtaaatggaacggtcaagcacgttgttatcatcagtaagtgcttgtttaatcattgagaaacgcttgtttaaaaaataaatttggagtaaaaagccgtactgttttggatttttataatacagtggtaaaactggattttctccgactggttcaaaaaatgcttttgtatgtaagtgttcggcaatcttcccagttaaagttgttttaccgacaccaatcatccctgctgtaataatcaccataatggcccctctttacttttttgtcacaaaaaatatcttactacaaaatattgtggaatgacacacctaattttacaatatttggtggttaccagatttaacttatcgtggtaaaagttatcacatctacattgttagcgattataataaaagtagagatatgattaaattttaaaaatctaatcatgtgaaaaattaatattaaggaagtaaagatgagaaaagaaagtgaaagtgagaatcgcgttcaattaacaatggccaagcagcaaggaacattgattgaggttcataacttgccaaatgatgattattttaatgtcggatttgtcgttgctctcgatccagtattttgtttgatgatcagtattgactgggatggtaaaatcaacggcttaattgctattcggattaagagtattctttatacagaacgccatagtgactacttaatgacggtttctgaaaaaactaaagttgcccatgatcacaactattttgatatttggcaagtacaaaattttattgataaccatccagaaattacccaggggaacctattatcaaatcttatcaatgattcctatgagaaccgtcttccagttgtgattggcactgaaaagtataagggaagtgatgattttacaggaataattactgatctcacacccattaaagtaacaattcattactataatgaccatgacctgtcatcattgtgggaatatgatattttgcgagcaaagattgactatctccgtgttcgtggtactcagatggcaaccgggaaacagatttttaatgatatttttaacgaaatgtgattgcaatatgagttgagatagtttaaattaattaaatattattaactagataaaactgtttactaaagaggttgaacagccatgaaaaagaaaataacaattcgtgatttagcaaaagaagctggtgtttctgtaaccactgtttcgcaaattttaaataataaaggcgatcgattcagcacagcaactcaggaacgagttttagcattacgggacaaatataagtacgttcctgacttcaatgcccgaaatttaatcttaaagagtgccaagacaattggggtattagttcctaatattgctaacccattttttggtacttttgtcgagggagtgcagagtgttgctcgtgaagcagaatttattccgctcgtctttagtgccaaccgtgacccaaaattggaaaaatattacctttcccagatgattgaacgatcaattagtggattagtgattgctagtgcaacgatgactacagagacaattaaagaagttatctcctttaatgagattccttacatcttgtttgatcaaaatcatacgcaggagggtgatcgagttcaaacgaatgattaccttggtggtcaaatcgcggctaaacacctcattgaacttggtcacaaacatattgccgttcttacctctgacaaccctactgaaaatttaaatcaccgaatgaatgggttcaaaaatattattaaagaaaataacctaagtttagatcctattcacgatgttattcgggcacctttgacgaaggatggcggatataaagcagcaaaagatgttttagcaactggtgcttctgctgtttttgcggcgaacgatgagatggcaattggattattgcgaggattacatgaattagacgttaaagttcccgaagatatttctgtaattggttatgataatatctactgggacgactatgtttatccacgattaactacagtacaacaaccaatttttgaccttggcgctggagctactaaaatgctcattgaacagattagtcatagtagtgcggaagcccgcgttcaaaactttccagtaaaattaattaaacgagatagtacaagttcctatcgtccaaaataatatggtatgatgatattatcaattagatgccaattgtttaaggaggaaataaacaaatgacaaatcatgtaacaattgtaggcagtttaaatgttgatacaacaatgaaagttaagcggatgccattacctggggaaacaattgccgctttaagtaagactaatgctgctgggggaaagggagcaaaccaagccgttgctgctgctcgttcaggcgctgaaacagcttttgttggtcaagttggtgatgacgctggtggtaagatgatgatcaatgacctcaagaacaacaacgtcgacacaacagggatccacgttgacgatcaagcaggtactggatctgcagccatcttgcttgatgaaagtggtcaaaacagtatcttagtgtacggaggagctaaccaacaattaagcgttaaggaagtagaagatgctcgtgatcaaattgccgctgctgattttgtgattgctcaatttgaaactccacaagaagctactctacgggcattccaaattgcaaaggaaaatggtgtaaagacaatcttaaatcctgctcctgctcatgaaattaaccctgatttattgaagttaacagacttaatcattccaaatgaaacagagagtgctgctttaacaggaattattgttacagacgaaacttcaatgcttatgtcagctgcaaagtttgctcaaatgggtgtccgaaacttaattattactgttggtgcaaagggtgccttctactgtactcaagatggctacaactttattcctgcttttaaggttaatgctgttgataccactgccgctggtgataccttcatcggtgcgctttcatcccaattaaagcctgatatgagtaacattgaaaaggcaattgtctacgctcaacgtgcaagttcattagctgttcaaaagcttggtgcattaccatcaattcctacttatgacgaagtagttgctgcatcaaagaataactagatttacttaaacacaaattaacaatggggaggctgaggaaagcgaaaacttttctcagccctcctatttttttcagtaaccttgcgcttaacgtaccaatttagtaaactgttgaacaaataataatggaggttttctttgtgaaagcagaatttattcttaaggtggttattccaccatttatcatctttgcgatcctcgtatggctaactgccgaacattatatctctggctgggtaatgtaccttctctgggtaattggtttcgtggttgcaaacatcattgtgacaaaaatttctacccggtggagtattcaacgaatgcgtgagaaacgggcaaaggaagagaaaaataatgataaaagtaattaaacaatcgtggatatttagggtgattttaattgcgctgatgttaattgcaattgagattcccccgattgcagttaattttgctttacgttattcaaagaccaaccagcttatcgtggacgggttcatggtcttattcatctgtttaatgctagcgattatttggtgggcacaccggacatatgaaacttataaccaattaggacagccggcgggaataaaggttggctggattatcggtggttatctagcgattattttgggaatggatgtccttagctaccttaatcaacttatctatcatcaaactgaaacagcgaacaatgcagcactaggaagcatgcttggtcataatgaagtaattacgatcgtattttgtttttcggcagttgttctaagtccaattgctgaagaatttatttttcgtggtacattgacaaatatgttctttaagcgtggcaacatctggccgaaagttatcttctcgggggtaatcttttctaccggtcatatgagtaccaaccccattagctttttgatctatgcttatatggggatggtcttagcatatgtttatttgcgaacggatgacattcgaaattcaattgcaattcatatgattaataatgcgattgcgatgtatgttctcttggttcaagttatctaaagttgcttcttgaaatcgcttacaattggtggtacattataagtgtggaaagattagaatggtaagatctcctatatcaatctagcaccgaagaaattaatagtaggctagaagcaacctaagtgtgacatgaaattttagactgaatatttatgtaataaggtcaccagggtgcactaggttgatgatataaatgcgactttgcggaagttagaatcaaaatgaattaataattagttccctagcaaagtagcagattctttccgcaataaacaaaagaggctggaaatgttccggcctctttgttatttttaaatggtaaagaatttagggacgtacaataccctttagggttgacactttaaataataaaagtgccaattctagggggtgtttttcgtttctagttattccacaacagaaaaattaagattactaagtaattatcaggattcagattgctcattaggaatattcgctgactatcacgaagtgagaacagcgaacatgactaaatggattaaacaatttttattagcaggactggcaggattaattcgtcctaaacataaccaaaaatattcacttaagacaaagattgccgcggtgaaagattatcagcttaacggactggctagtcgtgaggttttaattaagtacaaaatacgccatatttctcaactaaaacaatggattatccagtacaatagtgacaaactaactgttgcttacgcaacaagaaagcgagttaagaaaatgggtcggaaagtatcctttgatgagaaaaagcagattgtgcagtggacgattaaccaccagaacaactataaagaagcagctagtaagtatgatattagttatcagcgggtttattcgtgggtacgtaaatatttgcacgatcataattgggaagtactaaaagataatcgtggcagaaataaagataaagaaccgacaaatgagctcgaacggttgagaaaacgagtacgtgaattagaagctgagaaacgagaaagggaggtacaaattgcgttcgcaaaaaaattagtcgaaatacgcaatcgggaggtgcatcgaccggacgatatcaagcgattcaagaaatgattaaagacggttatacagtatcagaactagttaaagcggctaaagtaagccggcaagcctactataagtggctaaaacgagaattaactactaaggatatccaggatcaagagatccttaatttgattaaagaaattgagaaaactaataagcaaagtattggctatgggaaaatgactcgtcttattaagcgcgcaggtcttggatatttggtcaacaaaaaacgagttattagaattatgaaggaacatgagattaaagctgactatcgtcaagctaaaagaaaacgcgacaaggaacgtcaaacctatcaagctgaaaatatacttaatcgtcaatttaaacaggaagcagctaatcaggtttgggtaactgatacaacagaactcgcctacaatattcataattataaagttcgtttacatgtggttcttgatttatatggtcaatttccaattagctggctaattaccccaacagaaactagtgagggagcaattcaagtattcaagaaagctcagaaacaagaaggtgtattagccccacttattcatactgatcgcggagctgcttatacttctaaggcgttcaatcaatatttaactagcaataatagtcaacatagctattcagctcctggcacaccagcagataacgcagttatcgagcactggtgggccgactttaaagcaatttggctagcgcattcatctaagccacaaacacttgatgaacttcaaacactagtggctgaaggaattgaatactttacaaatacatttatttcagctaaaagaaatgaccttactgcaacggaatttcgttacggcaaagccaattaatttttattatttagtgtgtaaacttgacagggtacagtaccggaggataatagatgtttttatcaactgagggatttcctcaagcccaccgcattttagggattgtcaatgccaccagtcatttagcgatgcctaccgaagcaattgattcatttgagtccatggaccaattatttagtgatgttcaagaaaaattaaagcggcgggccagtgaaaaaggtgcagatggtgttgttggggttcgttttactacggatgttgccaatatgcaggttgcacccaaattcttggtcctaaccgcatatggaacaatgattcaatttgttaaataagggcaaattgaggattgtaaataaaaatacttgtaatttttgatgagttcggtatacttaataatgttacaaaatagttagtgcctcagtggcggaactggcagacgcgcaacgttcaggtcgttgtatggttatccatgtacaggttcgaatcctgcctgaggcattttttgtattttaaatacttttcgatagtgtctaaatcgttgatatatcagcatttttaattttaggtttacactatagaacactatttttaatcaaatccacgacaatttcacgacaaaataatatatcttcttgccaacgtgagccacctgtttttaggtggttttttattttgcttgtggaaatatctgcggaaaattcagccattttccttttagggtgtctgaattgtcggaattattgataaagtgtctctgattaattgctaaaaaggggatgttttagataatttaatttttatgattgttgatatatcaaaggctagggaaggacagcccctctaccctaaaattttaaaaattatcgtttgcacgcaagacgattgaaatgtgtgcgctcttttttgttcaaagataggggcgggggatgatataattatttttggttttatttatatctcaagggcgctctcacagcagagcgccttttttaacgcaatttaacgcttttaaacgctataatatacatatgaaaagcccctaagagttgagctaccaacttgcaactcttagggcggtgattaatcaccacttgatttcaagttttaagtctagcgatataaagattttgagctttaatctaatctttattttgctaggctttttatttacttttaagcgcaatttaactccaacatttcccaacatctgctagtagaaaatgttagcatttgctagcatcatgcttttataaattcctagcatttcctagcatttctgagcattttaacactaataaaatcctaggatttactaggttttaacagtaaagctagaggctttcaagggctatcaaaatagggtgcaacctttctcgtttttgtatgcacacttttttggaaagtacgcatactttttaatgagggtgcgcactaaattatactcaagataatatgctaaaatacctatggggcgtgaaaagtaaagttgttaatttttcgacaatatcaagggtagcttgtgagggctactctttttttatcctaccatttcctaccatcgtgccatcatttgccatcatttttaaactgggttaagcgattttttgaggttagcattggttaacattcagtatatccaaagtgataatattagattattgagtggtgcaaaataaaagggcggtctaggtgtctaggtcgtcctttagttagttaacttgtttttttacgggtaagcgcaattttgcgccctcgtcacttaatcgcttggctttttgctcttgtgctagtgatattaatttgtctaggtcgtctttatctgcatagtgtttaataaacgttttagcatttgaacgatattgatatagtttgtttttctctgggtgtcgtttcttgtatcgtttagtagcttctgcctgtgcaagtgtaaccatgaaaacatccccttaaattgcatatagtgtaatatagtgtcttatagcgtaaagttatatcttgtatagttatatgcacatgttataattgtttatgtaaaaaggcgctaggttgtgctagaacctaacgcccgacgttttcttgctagacaggtttacttcaaagcattagtagttagtagctattaatgcttttttagtaggctgattgcaataacaactacaaatacaagcattttatagcttgtaaatgttaatgttatgctcaccgccagaacctccctagcagtcaagaaacaaacacataaccaacacttccgtttcttgctgtgcttgtaaaaggctggttggtgtctagcttcttttccgccttgataagtgctaggttaattactcctattacttatcatgcttatattatatataactatcataagcatattcaacaataggggaacttctaatattgaatgctaactgatagaataaattcataccctttttagggtaaataaaatcatgtgatataatgaattgctttaagtttgtatctaaggggcgctctcacagtagagcgtctttttttattggaatttgttgcacaaaaaagtcgatgtgcgttcccaaagtatcaataaaccaacccccgttaaaagagaacgggggcttttttagtatggtctattttgatagcaaaagaggggcgaatattgctctttcttgctttcagttttgacgttaaatgtgattatatcaacgattacagctaatcactcataagcaataacaattaactacgaattagctaacgagtataagtttttccgatattgttttaactacaaacatccccgaaaatgtgcaatttttggcaatggtttttaattaagattgctgttatatcaaccttttagatgaattgataaattgcacattacatggaacatttactgtttcacaattccaatgtttttatatgcggttgttaccttgttaccgtaatagccaacataaaagcgatggtgcttttgataaacaaagcccaacaattccatgttttgcttaaattggcgattacttaatggagttatggattgttgttggcaataatctaaatagcaattgtaagccgtacggcaagcggtatataaacgcctgtctttattgacgttctcagaaaatacaaaattaacgacggttgggtctgctttatctttgttcttaactctaaaatgataatctttctcactttcagccatccactgtgctaaggatcgcttactaaatacataatgcccacgataccaactcatttataatcatcccctttgtactggtctttcatgtagtgggtgaatagccatataaccgcaatatcagcaaaaaggcttgccaaactacatgcaattgctccaattaacagacacgatacagcgaacatttaaatcaactccatttttctatatatgctaattttagttttaaagccgtctgagccgttttaacttgcaaatgataaattatatttaaaactaattatcgcttttaaaaccgcctttaaattaaaaataaacactattctaaatctgattagtatgtttattgctatgatcctacgagtgatattttggcggtcagattttaggctgtcaatttttgatagctgaattttaagccaccaaattttagataatattctcgtgtactgtaaggcgttttaagaagttttaactaaaagatgatgatttaccctaaaaagtaattaacgataaatagcgacggtcacgatgtggatctctggaaaataaacgggtgtttaagcataacctctccgccaatccaatatctttagcttttccgtccaattgataacgaaaaattacagttgagctattgatatatcagcatttgggctagtaaagcattgcacgctttttgtttccttttccgccgaataaattaaatcatcccccgattatcgttgatataacagtaattgggggatgtttattttcatcgctctagttgatcgcattcgtccaatttttcattaattgagtagttactgaaatagctatcaattaacttcttcttagtttccctattcttgcctgtactatgtgagtaatcatcaataacggctttaaggtgattaactatctgcccctcgagttgttgcgcctctttgagctttttattgtacttggtaacaagctgcttattttgctctagcagggtaggaacatggtgtttaattatacccatgtcgtccagtatctttttatgggcgaacggtattttgattaggctcttattcaattgtgcttcattctctgcaatttgtttgtctagttccttaatctgggtcagcttgatgttgttagtatcaagccccagtacaacgctagacagatgatcttcaatttcttcacggttcatagtaattacctctttttatagtccgactaatctgtcattacttttaagggtgcctaatctgcccaaactgcttcaaatatttattagctaatttatcttttgctttgctttcctcaccattgcttcttagataatcgcttctaatggtctttaattgcttttgaagcgaactagaaagtttcttggcttttattagctttcgattgtatttaattattaagtgcctgttttgtttgagtagggtaggcgtttgatgtttgaaaatacctagaccatcaacaaaatacaagtgggtaaatggtatcttgattaagctatcgtttaattgcttttcgttggcttggattaggttgtctaatcgtttaatgtcactcatcaatttagtataggtttcatatccagtgcaaaagttagaaaggcttttctcaaattctgttaggttcatgaatgtatcacctctgcgtcttaatcattactagaggatcgttccaatgtttgcttggtgtactcgggtaggtgctgtattaatagcttggctaatgattgttcgttttgatattgtggcatttgattagcaacgttcataatgttatcaattcctaattggatgtcctcaatttcatagccattatggattaacatatcaaaaacatcagcaagtcttttattatctttggggatatcagtagttgatataccgtttaagtagttgaatagactgttaatgttatcttggttggctccactatctactgcactgtttcctccattctctgtagtagcattattctctatagaggaagtagagctgtcgtcgttaagaagaatttccccatacccccattagaagaactatttatatacttgtagttattttctttattgatcttttctttgctgttctgagctgtactgtactgttctagtctactcttatctatactattcttatctatactaggtgaccctttagtaatctttttgtttacgttagatttaccgttcgttaccttttgggttaccacacctttcaaacgctgttgttgcaaggctttaagatttatctgtctgttgcgattttttctctctacccaatcatctaatggcaaggcaatatttctatcttctgcgtttattgtgtatttaaaatcaattctgataaataccttactggataaatcgagaaaagaagttctagaatagtgatttaataattgagtatttagccagtcaacaatcaagtaaactccctcaacattaacaataagacccgcatgttctaattcgctatagttttcagcggttgctttatccatcaaattaattaaagaaacatcagaacaaaagccatcatcatcagcatatagcactaaatcatcgtaaagaattttacttacaggcgataaagtcaaaaagcgtccgtcttggtgtattgacttactaatcattcttctttgtgccattactttgatcctcctcttggtaaacattagttacacggatagccttaaaaggaattagcaagtcatcatctttacttagataataaggggtactatcacgccaatatatccgcttgctaatttcatttcctgtcgcaaagtcatttaatatcaaatttccatcttgattagttgcttgaagcaatttcattactcatccctccatattcttatagcttaattgaccatcaacaaatagctttgttaaagcgataaggcgtttaagcatttcaacatcgttatttgtgacttgttcaatgcgttcaacaatcttttggcgttctcgctctttctttttgttgtgcgctaagtaatttggattgttaattgacttcatgatgaaataaaggcgagtggtgtttttatcatcgttgttcgttagcaaggacaacttagaatataagtcaccattgaagccgtctaagtaaactaagaaggtgtgaacttgcttaatatcattcccaacgaacttactaatacgggtagcgagttccgttggttctttgctgttctcggtgtttttaagatatgaataccacgagagcagggcgaggtaagtagttttcatgtcccaacgttcacggtgtccgtctggtgctgtaagagtaactagttgcattctgtatcaccgcctttgagttcaagagttgctaattgttgcaatgcttctaaatcattatcatttaggcgctctaagcactcatgtaaagcgctgataatatcttgctgataattgaccgttaagactaggctagttaaatcattgtgggtgtaatcatcctttaagcatggagctaaataatcattgagcctttcgtgataatcaattagggatgaaattaatccgctcatggtttcgtggtctgctataagctcatctattttttcagtcattacttgttaccacctttataaaagtcttcagcaacggttttaatttgattttgagcgtttgtcgttgctgtaattgttgcttttgctaatgctagtagtttggttactaaacgatcagcttgccacttcacgcccttatgtgtacttggatattcagtgaataaggaaacattgtcctctaaaaggtcgtttattgtttgtgctagtcctttaacagtatctaaagtaacgttagtgtcctctacttggtcgatattaaatttcttcatgattgattattcctccatttgttggggatattccccgttttaaatactgaaatatgttagaataagcaagcaacgggctttatccgttgcgcttattcttttgttgctgttaaatgctaactactttggtcggtgagtagcatttgacggcttttttattttgtcgaaacattattcttcactttctaaatctgcgttactgattgcctgcgctcgcttactcatcattgttatttgtgaggtgaggggagctaaggcttgttgtcgttctttgtcattggtgatgatgaaatatccgttgttaggatgttcatacttagcaccaattggctgatggtgaattacgattaagcgattaataattcctctaactctgcgattgctccatccagtaagtttcactaattctttgagtggtcgagggcgttcaatccctttaggcaacaagtccaatagttgttgctcttctttgtctagttgtttcatcggcttcattcctttacttgattaactgagcgagtaaattcattgctacgagtacaacaggcaaggtaacaaggtaagcccaaactctttcacttggtgctgtgtcccagtagcttaatatgtgtttatcaatagttattaaaagcttcatgataataaatcctccaatatccacgctggcaagctgatattatttatttttcgtgctggatcaaaaactcatctagggctttacgtctgaaacgactaacgccctcaatcttaattgtggggatgtcatactttttaagccaagcattgaagacaccccgtgatacaccacaataggcactagcttcgcccttattcagataaggtgggaagctatttttattttgcacatccttaatcgctttattgagtgcatccccaatcattgctttggttgcttcctgtaaatcatttggcaactgcacttgtaaactttccatgttctcaactccaatcattaagctaatagcaaaacgccttttacttcgtcccacgtcttattgaggccaacaaggccaatagcgatattctctaattgctgataccgttcttgctctttgagtgttagaccatctaacgcaactttgacgtgtcgctgtttcttaatttgctgtgctgttagaccagtagcacgctttaataaaagctgtgtcatattgcgataactccattgagtaacgtgtggccaatccttgacagcgtccatcaaagacttacgctgtggcttttcaatagctcggttgatctgtcgttgattaagctcttttctcatacggtagaactcatgaacaaggtttttcttgaattgatttacctctggtgtgttatctaggtaggtaattaagagcgtggcttgttgttcgttaaggtggtaggtcttttgtggtcgtccacgtccatttaatttacggatttcaaatcccaaaactccgaactcttcaaagtctcttttatgattacggattaggtgcttaacattatccaattgattattactgcattctgaaatgatcttatctgtggtatacggctcttcattcaagccgtgcatgaaaactagattattcattcaaaacatccccttatttgtcttgcgtttttgagaattcttttattgatgtggataatttatcgaattaattagttgatgtctggctttgtacatctgtatgtacgttactcaaaaatgctggcgttttatttaattcttgcaagtgatttttttgtgcctttgttaacggtgattttttccgaatagtaactttcccgttgtctacatcaccctctagcatgattaatcgacctgttgagttgtaccctttgcgctggggatgagttacatatttctcgtacttcctagcatgtttgggttcgttcgtgtaaatgtgccatatccctgttaaacactcgtaagaaataatcgtctcacgttcttcttgtggagctactttcatatttcgtttaacttctgtcattccttgtcacctctacttgtcttgtgttgctactgcggtgctgtctttaatatctgctgtggcgtactcgtcaataagccaatcactcaacttcttataagttgctggcgttaccttgcgatggttacgcttaaagatattgtctagcgtccatcgacttaaaccgagttcacgcccaagtgctacagtagataaattaagttcaccacgtttgcgtttgatagctattacttgcttatctgttagaaacattggcatttaatatcacctctattcacacaactgtgagtaaatattaattcacataactgtgaatgtcaataaaaatgttcacagttatgtgaaataatgatattatttaatcaagtaaagaaggtgataatatatgagtgaatattcctatcatcgctataaacatcacaatagaatcaaagaattgagaaaagaaaaaacctaactcttaaagagctaggcgagaaagttggtatgcgagataatacgttaagccaatacgaaaacgaaaaaagaaatcctaacgatgaaatttggagaaaactcgctgttttctttgatgttagtacagactatatcaaaggattgagccacgaaagaactgatccttatgaaagtataggcagaattattaataaaattaattttaccgatgataaagataaaaacgataagataagagaacaattatttgaagcctttgctatcgtcctagaaagtacagaagacaaactagtagatttagaaagtcgaattgataatgttgaccctaactatcatgacccttcatggtatttatagttaaaagctactaggagagacactataaaaaactttattattaacgcatttgattgcatatcaaatatcgttgttgaagttttatgtatcgtacttccttaggctaaatagagctaatttatcagaggttttcagaggtagtgtcattgttcgatgtgatattttgtagtaattaatctgctgtttttctgcactttttacgttgaaacccttgctgtgcttggcttctttctgctgatttattgctgatatagctaatatatagccgtttaatgttaggttttgtaaggttctatactgcgaaaccaatatacacactaatagcgccactgttatcaccactaatagcaccactgctatatttccccagttttggggacatctgctaagaattaagccaatgttcaatcggtcgaaaactcggctgattacatccgtccaaaatcggacacatcttactcacctcaattttggggtaagtacatctgcacataattgcgtgcgtctttactcggctcaaaattgagcccggcaaaattgcggagtgaatatcactcagccgaaaacttggctcagtacatccccttttgacagcgcaaaattgcgccacgaaaactcaaatacatacctccaatatccacgttggcaagctgtgcgattgaaagaggtaattttatgagttatgtaagaaaagcgaaaaaaggatactacggttatgcaagctaccaagataacgaggggaagtggcatcagaaatcagccggctgttttaatttaaagcgtgaagcactgcaagaagccaataaactagaagcagagttagaccaagtgaaccttgatttaaaagatatgacactagctaagtattattggcggtggtatgaactctatgaggaaaatggtattactgatgttacgaaaaaccgttataaggttatacggaaagccattgaaagctactggaaagatacacgactacgggacatcaagcgctctgattatcaagcctttattaactggtacggtgctaatcatgctagggacagcgtaaacaagctcaataatgctatccgttcatgtgttggctatgcgattgatgatgatattatcagcaaagacttcacgcataacgtcaaggtggtagctaataaagagcgagagcgcaaagttgaataccttagtcatgatgagttagtgacactaaaaaatgaggtcaacaagaagctcaatcactataatacaagccgttacatgatactcacggcaatttatactggaatgcgcaagagtgagatacaggcgcttacgtggaatgatatagattttttacattcaacaattagtatttctaagtcgtgggacgaaaagaaaaaaactttcaaaccaactaaaacagaatctagcaagcgaacgattaaggttaaccgtcaactgttaaatcgtttagctgaattgaaagctaataatagtattatggtgtttcaaaacgtgttagggacaatcccaacaagtaacgcattgaataagtgtttgcgctctattatgaatgactgtggcatcgaaaagcaagggtttcactttcattccttgcgccatgttcatgttgcctatttgttaagtcaaggtgtcgatatatacgccatcagtaaacggctaggacattcaaacatcactgtaaccttaaatacttattcttatctggtggatgagtacaaggctaaaaatgacacgctaatcattgataaactggctgaattatagagttcacgacaaactcacgacaaaataaagctcaaagcccgttatatcaatgtttaatattcctgcctgaggcatcatcatagctcggtaaacattgatttgctgggcttttttctttatattgaaataaaactgcaaaggaagaccaaaatgaaagttttatcaattcatcccgaatatggaatggaaatcttaaatgacacaaaaacagaggaataccggacatggacaactaaatatcgtggtgacctcctaatttgcaatagtgcaaagaagacacatggggcggtagctagtcatgcgttatgtgttgctaagattactggaattgaggaacgatatgacggtgaacaaaaatattatgcatgggtgattgcaccctttgaggaaggtggttcttattggattgaaccattaaaagttaagggacagttaaaattgtttaacgtcgatgaccgcttgattaaacctgcgccgtttactaatcctttctcaaaagctggggaacaatggtaccaggaaaagattgcgcccttaatctattaagatattttcaccaactaacttatgcgttatgatagaaaataaaaaatgaaggggcaatagcttatcggaaagattagaattaacaacatggcatttaatacttacaatggtgtgtttgcggaagagaaaaagcttggtcaaaaaattgaaattgactgtgaaatggactacccaattgaaacgatggttaaaaccgatgaattagaggaaactgtcagttacgctgatgtttatgaaacaattgcggagtttgttgcccaccataattacaatttgattgagagccttgctaataatttattgcatgagcttttcaaaacatacccaatgcttaatggtattcgccttcgtattcgtaagtatagtgtgccaattgccggaatttttgataatgtcgaaattgaagtagcagggagcaagtaattatgactgaagtttacctaagcattggcagtaatatgggcaaccggttagcaaaccttcaaaaagctattcagatgctgaatgtgccgcctaaaattgatattacggcgatctcctcagtgtatgaaacagaaccggtgggaggtgtcaaacaagattctttttacaatattgcggttaaagttgcaactgggttaacagctcagcaactccttgaccatcttcacaatatcgaacaggagttacatcgacgccggctcattcattggggaccacggacaattgaccttgatattattgattttggtcatcaacatattaaaacctcaacgttaacaattcctcatccagaaatggctaaccggcagtttgttttattaccaatgcgcgaaattactaatcaaaatgatccttattatcaacaattggatcatttattaaataagactccagaccataattggcttaaaaagatatatggacgagaggtattttcatggaccaacaaaaaatagcaaaggctgttaaagatttattaattgcaatcggtgaagatccggaacgagaaggattggcagagacaccccagcgcgttgccaaaatgtaccaagaagttttttcttctcttaaccatcaaccagaagaagtggcgaactataaggtctttcatgttgatgatgtgccagaaatggtattagtgcagcacattcctttttattcaatgtgtgaacaccatttgctgccattcttcggatacgcgaatgtggcttatgttcctaaagataagaaagttattggcctaagtaagatccccggttgttagattttgtaacgaaaaaaccggggatgcaagaacgcgttacaacagatttagtagccgagttgcaacgaatccttgatccagccgggattgcagtaaccattgcggcccgccacctttgtatggaaatgcgaggtgttaataaggccggtcaatttacgtatactgataagtttacaggtcaatttaagactgacagtgatttgaaacaagaatttctaaatcaaacgaggaattatcgtgcagacctatgaacaaattaacgcgggctttaaccgccaaatgttgggaggacaacaggatcgggtaaaatttttacgacgaattcttactcgtttaaaaaatcctgaccagcgatttaagattatccatattgcggggacaaacggaaaaggctcgactgggacaatgttagaacagggtttgcaaaatgctggatatcgggtcggttattttagcagtcctgctttggtagatgatcgggagcaaattaaggttaatgaccatttgattagtaaaaaagattttgcgatgacttaccaaaagatcaccgaacgcttaccaattgatctttcgcctgatgatattaccatttttgagtggtggaccttaataatgctgcaatattttgcggatcaaaaagtggattgggcagtcattgaatgcggtttaggcggtcaagatgatgcaaccaatattatcaatgcgccttttattagtgtgataacacatgttgcccttgaccatacgcggatcttaggcccaacgattacccaaattgcccaagctaaagcagggattatcaagaatgggactaagcaagtgtttttagcgccgcaccaagaaaaagacactctcacaattattaaggcaaaggctcatcagcaaagagtgggattaacgcaagcagatgcccagtcaattgttgatggaaaggcaatcctgaaagttaatcataaaatttataaagttccttttaatttattagggacatttcaaagtgaaaatttgggcaccgttgtcagtgtatttaattttctttttcaacgaagactggttacttcttggcagcctttactatcaacgcttgcgacagtgaagattgctggtcgaatgcagaaaatcgctgatcatccttctattattttggacggggctcataatccagatgcagccaaacaacttaccgaaactatctctaagtttccccgtaataaagtaattatggttcttggttttcttgctgataaaaatattagtcagatggttaaaatttatcagcaaatggcagataagataataattactactcctgaccatccaactcgcgcccttgatgtaagtgagttgaaatcagctctgcctcaagcgattattgccgataatccccgaaaagggttagtggtggcaaaaaagattgcggagccgaatgatttaattattgtaacgggttctttttatacgattaaagatatcgaggccagtttagatgaaaaataattttattattgcaacccataatattcataaaattaaagaaattgaaaccattctaaatttttaccaccaacacggtgaggggtatcgaaaaaagttaccgcaacaaacctttcctcctgaatcaatagtgagctatgaagaaaacgcaaaggcaaaggtcctctttatcagtcaacaactaccggcagcaaaaataattaccgatgattctggcttagaactcccggcttttcctggaaggtacggggtgcagacagcgcgggaattggcacaagaagttcctaatggtgatttaaatgattacttgatccatttagttgatggtaaatcccgacaatttataatgaaaacaacaattgccctggcgataaataatcaagtggttaaaattggtcatggtcaattaaaggggacaattgctcatgccgaacgcggagtcaatgcgacggggtttgatcggatttttattccagctggtgaatcacaaacgctcgccgaaatggaccagccgacccgcatttcttatttacatcgtgcacgagctgttaaaaatttattagatcaattaggagaatgaaatgaaagttactgaaaatttagttactaaagactattcgaagttagtgtccgcgatcttagccgaccaagttaatcgccatcagcagcttttattgacgtgggagtgtccagatgtggagacggctggaatggtagagcgatttatccgtcattttgatacccctgtcgcttgtgttgaaaagcgcgtagaattttctttcccgctcctttccctaaaagaactaatagcacgggtgaaagagcggtgggagaacgaccaagaattaattgcttctcttgaacaggtttaccgtcgtcaccagattatttggcgtgcaggccggtttacttttgatctgacagagcaaccggtgatttatggaattttaaatgtaactcctgactcattttatgatgggggtaaatttcaatcccattccgctattgctagtcaaattgctaagatggtggcagctggggcaaacgtaattgaagtcggtgggcaaactacgaaaccgggtggctttaaagaggttgatccggaagaagaaattgcgcgaattatgccggctattcagcttcttcgcgaaaactatccccagattgcgatcgcagttgatacgtataaactcccagtaatggcagcggcaattaaggccggagtagatattatcaatgatgtgcaggcatttaattcaaaacaaaaactaattttgatggctaaggcaaatgttggaatggtaacgatgcatagcagccgaacccatgactatgataaccttaccgtagcgatgcagaaattctttgaacacaatcttgggacaatagcggctgctggcattgatcttgaacgagtgattttagatcaaggaattgggtatgcaaaggttgctgacggttaccaggattatgcgacgatgcgaaacattgaccaccttaattacctccagcgcccgattatggttgcgatctcccgaaaaggttttggtcaaaaattatttaatctagcaaaagaagaccgtctcggcgtaacattgattgctgagacagcaatgtatttgcgaggcggtcgtgttttacgagttcatgatgttgaggaaactagtcagttagtgaaaatgattgacactattgaaaacagttattggtttagatccaccagcagccaatccccaaggcaataataagggcaataaaaagtaaggctgttagatagggattgccaaatgtttcccgtttaaggcggaaagcagtttccattaagatatagattagaattaaaaagatgatccatactaggttgctcagaagctgagtcttgaaatgaagaaaggtatggacaatcgaagcggtcaataaaaggaaaaagaataaacggcttagttcaagccagttagtcactttccgttcaatttttgcatgcagaccagtggtagtgatgagaatcaaaataatgattaagaccgccactattatttttaacatatgggtaaactcctttcggctttgattttagcattgatgagagaaactgactatatgcgttagtgtaagattttcataggttggatgaataattcatctggtcgtggaaatcttttttgtagaccaatttacttatttacaaaaaaagaaaagaccagtagcctttagtgtgtcgaatactaagcaaaggcaggtctttcctcatggatattttaacagaaatcgagcagaatttggtgaaatcaggcagtttatttgaagctgaacagattattttaaaaggggtattggagttaggacaagtaatcatgcaaaactttttggaaagcttagatcgaagcttaaagtcccaagctccagcgaactatcaagtaattaataaacagccacggacgcttaattttatctttggcccggtgacttttcaacgacggtattatcaggctgggacaaagaaacgtgaattttacttagaccaacaattaaaaattaaaccacgtcgtcgtttatcgccacaatacttaatgatgatggctaagattgcccaaacaactacaatgcgcaatactgccgacattttgaaccttgtatttgacagcggaattactgccgattcggtaatgcacgccgtgcatgagttaggaaatcaggtagctaaacaaactcaagcaaaagaacaccaagctactcctcgccatatgcctaaaaatttaactattgagggtgatgcctttatgattaaaggtaaaaaagaagcaggtcagctgactcttgtgcaccattatcgggtttatgagcgagtagctaatcaaatcattaatcggcatgactttctcagtgttgggcaccaaggacggcttgaagcacgactaagtgattatttagaccgccattataagcttgccggtcaaacgatctttttggccagtgacgctggcccaggttacgaaccagctaagctattaagtctagttcctcaaggtgcacatggtgaatactttctcgaccgctatcattgtttacagaaaattgaacatactttaggccggcacaacgagttagccatgcgagcaattaaagccgttcgtcatcatgatcaagcagagctaacaataattttagatacttatgaatcacaaaacctaacggaaaaacaagcagacgacctaatgcgtttaagaaagtatctacagcgaaattggcggtatatcctctcaccacaaatgcgtggatttaaggatattcatttaattggttcagtcgaaagttctcaccgggcttttacttaccggatgaagaaacagggcaagtcatggactaagcagggggctaaagccatgattggtttaattgaagcccgaatgaatggtgaactgcaagctagtttaaatacaatcctagaacaattaacagttcttcctcgagtggctcaaaccagcctattacaggaaatgcatattcgaactggagagtttctaagaaaggcaccgacaaagccgtcaattggagcagtacaaggaataattccgattaacacggccacaagtagaccaatgggacaactttttaaggcactaacccactaaaactgtatatttaaaggctacctatgaaaacttgacagatacactatatgcttttgacttgaaaatataataaaaaaagtgtatggtacgtatattgcttgcgtaaaaataaataatatttgaggtgaaatcaagtggcagattttgaaattggcgatattgtaaaaggaaagaaattcggtcccctcgaacatgaattttctggtgttgttgaaaaggtttatactaattcaattatggtatccatccaagattttgatccgtctgataaaagcggggttaacgaattaaatggccgcgctgttattcgccaaaaagaagctaagatggtaaaggctgttcctcgtgaagaagaaaaggatgacgaagaaatagtagaagatgctaaatcttcaaaaaaatcttaaaaaaagatgacaaataattagaagaggtatatactaactaagtgttgaacttagttagttaatgcgggtatagtttagtggtaaaactcaaccttcccaaggttgcgtcgcgagttcgattctcgttacccgctcttataaaaaagctgaggctaagagaaagttttctcctagcttcagcttttttagatctcaatcttagctaaaacttgatgcattgcttcagcagactgttgcatctttttaacttcatctgatgttaacggatattcaacgacctggccgattccttgattattaatgatggcaggcgttcctaagtacaggcccttaattccgtactgtccatcaagcggagccgaaatcggtaggacaaggttccggttttcgatgattgcccgtgtaatatacgagaggcatttagcaattccgtagaaagtagcccctttattggcaattatttgactgccagcttcgtgaactgttttttcaatttcacttttatcaatatttgaaagggcagtaattgtattgagggcctttccaccgattgtgatttcattaaaggccgcaaaagaagtatcaccatgttcgccaagcattaaggcatcgatgacattgacggataggtgtaatttcttgcttaagaggacccgtagccgcattgaatcaagagaagttccggtcccgataacccgttctttaggaaaaccgctgattcgctgcgcaattgttgtaaggatatcaacaggattgcttgagataacgaaaacaccagtgaatccacttttgacaatcggttcaataattgacttaagaatcgtagtgtttttattaactaggtctaaacgtgtttcaccaggtttacggggaatccccgctgtaataacaaccacgtcagcatcagcggcatcttcataggttcccgcataaatctttactgggtttgtcaggggtgtaatatcagcaagatcagccgcatccccaactgcttttgaccttgtacgatccaccagtaccaattcatcgacctcatttgttgactgcaataatgaaaatgcaaatgatgagccgacagccccgtcacctattaatacaactttgtgcctatacgtatcaagcatcaaaaattcctcctaatgcagctccttttgcgcatcccaatgattgattgggccaaatttatgaccaaccgttaatggatttgcgattgctgcgtaaacggcatctttagcctttgttactgctattttaacattatttcccttcgcaagctcggcagcaatgatcgcggagaaactatccccggttccattcaaccgatcagtcttaacaaaaggttttttgagccagaagctatcaccgtcttcaagaagaacaaagtcatcaacagttgtttggctatcatcattatgcgcgcccttaatcaccacattttttgcccctaagtcttgaagataatgagctgctttaacccgttcttcatctgtggtcatttcaattcctgttaatttttgtgcttcatagaaattaggagtaataacagttgcaaggggaataattcgttcacgaaatagttcataggcggattgttcaagcaacattgcaccgtgcttagtaataatcacagggtcaacaactaacgggccaaaatgttcaggcgaatagttatcagcaacgacattaattacatcgtcattagcaagcattccagttttggatgctttgatgtcaaaatcttcacttaataccttaaactgttcggcaataaattcttgcggcattacttgggaagaggtgatcccgtaagaatttccggaaacagcggcagttaaaataccgtgaccatatacgccatccgcaaaaaaggcatgaaggtcagcgggcattccagcactcccgtccgaatcatgacctgcaattgtgacagcttgaattgtagggtttgtcataaataactcatcaacctttcattattatttaatgataataattgtaacatataataagtaagaaaaaagtaataactcacccttgtagattagtccttgtttttaaatctaaatttgttataataattgagtgtgaaaataggatttgaggagtagtagcactttgaaatctacagcgaccctttgttgatgagagttaggggcttttcgatttgtgaaggcgtgcctcagatatttcaattaaatcaatgaatgagtggaattctaattcaattagagtggtaccgcgggtaaatctcgtctctagtaagcattatgcttattaggggcgtttttttataagtataaggaggaatatatatgagcgataagcaacaagttgcagctgcattggcacaagcattgccagagatggatgttaaagaaattgaagctaagattgaacggccaaaggattctagtaatggggattatgctttcccgacattcttcttagctaagaccttacataaggcaccgcaaatgattgcaagtgagttggttgaaaaggttgaccaaaacggttttgaaaaggtagttgttgctggtccatatatcaacttcttcctcgacaaagcccaagttggtgctaagattttgcaaactatcttagcggatcctgaacattatggtgagattgatcttggtcaccaatcaaatgttacgattgattattcatcaccaaacattgctaagcctatgggaatgggtcaccttcgttcaaccatgattggtgaagctgttgcccggattcttgaaaaagttaactacaacttaattcggattgattaccttggtgattggggtactcaatttggtaagttaatggctgcttatgagatgtggggagacgaagcggaagttaagaaggatccaattaatactttgcttaagtactatgtgcggatcaataatgaagctgacgaacatccagaatacactgaagcaggtcgtaactggtttgctaagctcgaacatggtgacgaagaagcatggcggctttggcactggttccgtgaagtttctcttgaacggttccaacgtgtttacaagatgctagatgttaacttcgactcattcaatggggaagctttctctgctcaaaagatggaagaacctatccaattgttacgggataagaacttattgaagcctagtcgaggtgcagaaattgttgaccttgatgaatataacttaccaccattactcatcatcaagagtaatggaacgacaacttacatcactcgtgatttggcaactgcacttttccggaagcggatgtatggtcatgctaagtccctttacgttgtcggtgccgaacaagaaacttactttaagcaattacgtgcggccttaaaggaaatgggcttcaactggtgggatcaaattgaacacatctcctttggtttaatgaacttaaacggtaagaagatgtctacgcggaagggtaatgttgtttcccttgaagacgtattgaatgattctattgatttagcacggaagcaaattgccgaaaagaaccctgaccttgaaaacgctgatgaagttgctaaagaagtcggtgttggtgccgttatcttccacgatttaaagaactaccgtcggaatgctgttaacttcaagcttgaagatgttgttaagtttgaaggtgaaactggtccttatgttcaatatgctcgtgctcgtgctgagagtatcttacgtaagggtggcatccgggactttagtgatgttgacttgacaaaggccggtgctgaagcttgggaattaatcagcttccttggccaatacagcgaagcaatcaagcgggctgcattaaactacgatccatcagtaatcgctaagtatgctcttgaattggctaagaagtttaaccaatactacgctcacactcggattcttgataaggacgaagctcaaccagcacggttagctcttactcaagcagttagtgatgtgctcaaatctgctcttgacttacttgatatcaaggcaccagatgagatgtaaataaaaagcgtgtggagaatagccttgtagtgacacgaagctagttccactttatcttgctattattcgtgaaaatagaagagggagaggctgagaaaaacgtcgttttttcaacagcctctttatttatatgaactttatttaagatatcgtggaaattaaccacaaggctcgaggctaagtccgaacgataatcagcccgtgccgtgctaatcaccgttctatccttagcccaccgccttgtcgagaaggttaattcccactcacttcctcttcttttaatttctggtaaagctggcggagaaaatagcttaccatttgccaaaatgtgataaaataattgtcagctttttgaaatgaaaatggagatttgttaatgaatcgtgaaccacaatctaattcagatttgaaagagcgaatcatagagtggttaaaaaagacttgggcatcgttccgagtttggtttaaacactattggcagctctttgttgcgatgctgaaaaagttctggcatcggtatcaattaacgcgatggatcattgttatttttctaggaattttcttaattaccagtatccatttgacgtttgttgctaaaactgcagatgttaaaaatcttaagaaccggttgcaacggccaacaatgatttatgatcgtagcaatcaatcggccgggagcctctacgctcaaaagggaacttatgtggaattaaaagatatttcatcaaacgttcctaacgcggtcctctcgactgaagaccggaacttctatcatgaacacggcttttcagtcaaagggttaggccgtgctggcttcttactagtgaaaaacaaacttcttcaccgtgactatatctctggtggggtagtactttaacacagcaactggttaagaatgcctttttgactcaacaacagaccttctcccgaaaggcccgggaaatttttattgcggttgaggtagaaaaccaatacagcaaaaatgagattttaacaatgtacctcaataatgcctactttggtcatggggtatggggagttcaagatgcggccaagcgttacttcaatgaaaacgccagtcagctaacggtaccccaagcagctaccctggccggaatgctgacgtcaccagggatgtacgacccagtagaacatccagcagcgacaaaacaacgacggaatatggttcttcagctgatggttgaaaatcataagctgagtcaaagtgcagcggatcaatataagcaaacaccgttgaatattaccaacggctacgtgccaaatgatagttataagtatccgtacttttttgatgcggtcattgccgaagccgaaagccgttatcatatttcagaaaaagatattatgaataacggttatcggatttatactaccctggatcaggatcagcagcggtcaatgcagcaaacttatgacgatgacgataacttcccgcagaactcagccgatgacacaatggttcaatcagcctcgattgcgatgaatccgaaaaatgggggaattaccgcggtcgttggtgggcgtggaaaacatgtcttccgtggatttaaccgttctacgcagatgcggcggcagcccgggtcaacgattaagccgattgttgtatatacaccagccctagagcatggatatttctatgattcaacgcttcaagataagaaacaatcgtatggaactaataattacacgccaaagaactatgatgatacctatagcgggacggtaccgatgtataaggccctttatgagagtcttaacgctccagcagtctggttattaaataagatcggggtcaatcgtggttatgatatggcaaagaagtttggtttgccagttgaaaagggtgataagaaccttgccttggccctcggtggtatgacccgcggagtatcaccgcaacaaatggctcgtgcctatgcagtctttgccaatgatgggttgatgccatcaccgcactacattaccaagattgaagatgcctctggaaaggtgatcgccaaaaatgatggtagcaagaataagcggatcatttctggtaagacagccaaagaaatgactagtatgctaattggcgtatttgatcacggaactggtgaaacggccaaaccaagtggatatacgcttgccggtaaaacagggaccacaaactcaggggtaaaaggcgatgattccaatgatcgtgataagtggatcgtaggttatacgcccgatgtagtggttgcaacatgggaaggctatgatgatacaaaccaaagccacaccctaaacgatatttctgaacggagcattaactacctttacaagaatgaaatgagtgcgattttgccaaatactgctggaaccaaattcacggttgaagatgctcaaacacgggcaaaagaaaagacaaagggttcctctaaaggatggggatcattcctcaaagatgagggcgactttgtaaataacttcaaccaatcagtaaataactttggtaataaggcaagtcaatggtggagcaatgttcgatcgcttttctaggataatatgatacaattaatctaagaatgagataaaggagacttttacatggttgtaaatatttatgatactgcaaatgaacttagtcgccaattgcgcgaaactcaagaatatcaaggattacaaaaggcttttgaagcattaaaggctgacagtgacacctttgacactttcaagaagttccaacaagctcaagcagatgctcaacacaagcaaatgactggtcaacaaccaactgatgatgaaattaaaaacatccaaaaccttgccaaggaagtaagtggcaagaaggttgttcaagacttgatgaaccaagaacggcaagttgatagcatgcttcaacaattgaataagacaattacaagtccaattcaagatctttacagtgaagtaatgccaaagatgccaggacaagaataattaatttattacgatccaagtgaggggctgggagaaagcaaaatttttctcagctcctttattgttaagaggaaaaattatgagatttattcatacagccgatttacaccttgatagtccttttttagggttgacttcgatgcccaagccgttatggaaacgcgtccactcatcgacgtttactgcttttcaaaagattgttgacgatgcgattgccttaaaagttgattttgttttaattagcggggatatttatgaccgtgatcagcaaagcattgccgctactgattttttcattaagcaatgtgaacgacttaatcaagcccacatccccgtttatctactttatggtaaccatgattaccaaattgtccaagacacgggagagctgccagcaaatgttcatgtttttggcaatcgcgtaatgaccaccactcttactttggcaaatcatgacagtgttgctatctcaggctttagttatgatcagcgctggattcaagaagatcaagtgcaaaaatatccatcaaaaagaaacgaaacctggcacatcgggatgcttcatggagcagtccggcaaagtcaaaataaccactatgctccgtttacgaccgatgaattaatcgctaaaaattatgattattgggcacttggtcatattcacaagcaccaattcttgaatgagaagccgccaattatttacagcggtaatccgcagggacggcataaaaatgaggccggacagcacggctattatttggtggaaagtcagggcaataaacttgtgccccaatttaaaccagttgcggaaattgaatggacaagtctaactatcaatgctttatcaactagtagtcttgttgaagtggagcaatccctggcgcaagcaattgatgacaaacttaaaaacgcacctttccaactggtagagctgacgattgctaacattgaacaactttccccaacgattcggcacctgcttgcaaatggggatgtccttgaacacctgcaggatcaaaatgcagataatggtaaatggtgggtctatgatctcttgctccaccagcaaaattcgttgccatcaatgactgacctagatgaacagtattggcaacaagccgcccaagaagtatttacccctgctaatattgcagaattaacaaaaagtttagcacgggatgccgatttagcagctaagttgacaacccttgatcttaagcaattaaagcaagcagcgactcaattattgcggcgggaggattagcatatgaaaataaaggaagtccgtatcgatggctttggcaaatggcatgaccaagattttgactttacagctaacccccaaataatttatggccctaatgaagccgggaagacaactctgatggcctttcttgttagtattttatttggctttgcggatgggcggggaaagaatcggtttgcccagtatattccgaagactacttctaattatggtggaagtttattagttgagatcaacggccatgattacgtgattaaacggcaacgcgggcggaatggcggtaaggttagtgtgactgattcacaaggacgtcaaggtggtgaacaagaactaaagcaactgcttggcccaatggatcggtcgctctatcaagccctttttagttttggtcaacgagacctaacagctgtggacgagcttaatcgggatgaatggcaacaacatctgcagcaattaggggcagttggtagtgcacagtgggaccagttgatcaatcagtaccagaaacaagctgaccatctctataaaccgcgcggacggaaatggccgctcaatcaagaccttcatcaatatgcaaatttgacagataaaattaaccaagcgcgtggtaaatttcactgttatcaggacctacaagcagatttgaagacaaacaaagcaaaattacggcaagcacaggcagaattgcaaaaacaacagccacttttgcaaaaattagcacatttacagcaattgtggccggtttactatgaatggcaaagtagccaccaaactcggccgcttgctgattatttaactgatcagcaggttacgatggctcaagaactacaagtgagagaaaaggaacttcgccgccaacaacaggtttatcaacagcgcttggcaaggatcgatcatcagtctccacaagcgcctaagcattcaccacaaagtatgccggaacttcaacgacttaaggagcaggtagttgaattacaagcggaagaggctttgcagcaccgtcaacaaacgcaagctaatcagtggcaacaggaattaactgcaattaaaactcgctaccaccatcccttgccagcgccattaacctcacaggaaaaagcagaacttgcccgccttcttaatgtccaaccgctttctcgggcaaatacgaaccagtcaaatggcgatccttctcgcgccgcaatgatcggaatcatcggcggctttgtcctttttatcattggattattagcgaatgccacttttattaccgctatcggagcaattgcggcctttgcgacagtgatgtatctttattatcaacgccaaggaagtcattctgctccagtaacgacagattcccaagcaatcacggcgtttggccaaaaacatggcttacaggattttccacttgatcaatggctattaatccagggagatttacaacgaaatgccgaattagctgcccagctccaaactgccaaacaagatcagcaaagatatgaccaccaacttgctatctttaaccaacaattgccaccagctttgcaaaatctaactttggcggctgttaggaataaattggatgatttactggaacaagggcaacaagcgcgccaggatatccaagcaaatacccgagaaaaagcaacgattgctaacaatttagcccagctcaatcaagactacagtaaaattcatcagcaaaaactggcgatttatcagcaagcaggggtgaacgatgataaccagtttacccagtacttagcaaatcgttctgcagcacaatcacaagccttggcatcagatgcctatggacaacaattgaccgcagaagaccgccaagcgcttgctgcatacgcaaatagagatgagctaatgacggctttagcgaagactcggtaccagcttgatcagctcaacctaacaatctctcatacccacgaagagattcaaaaagataaagtcgaaattgatagtttagttaaagatggaaccctcagcaatctggaacaagaacgggctaacctagccgctaagatttggcatgaagtacaggaatggttaaggtaccaattggcaattcagtggattaataaggccctggtaggagcttcagctgatcgttaccctgcaatcattcgccaggcagaacaatattttgccttgttaaccgctcatcgctattcccggatccgtttaacggccgatggagtcaaagtgatacgaagggatcaagaagtttttttagtggaagaattgtcgcagggaacggctgaacaattgtatattgcgctccggcttggctttgtcaccgtgatgagtgatcaagctaacttcccggtaattattgatgatgggtttgttaattttgataacgttcggcggcaacgaatgctggccttgctagaaaaaattgctgagaagaatcaggttatctattttactgctgatgatcggattaaggaccttgacgttaaaattcttgacctgcaagcattaaaccgtgaataaattatgaagatgatataaacatttatttaggagactggcacgaaaaaataagtgtggtatattggatgagtgaagttatcgaaaaaatattttgtttaaggatgtgtttcttacatgaaatccaaaaagttaattgctatcattgcaggggccgcattgatgatgccgcttgctgcctgtggaaataaagcagtcgctactactagcggcggtaaaatcactgagagcgaatactacagcagcatgaagcaaaccagtgctggtaagcaagtgcttcaacaaatgatcttagataaggttttggagaagcaatacggtaaagaagtcagtgataagcaagttaacgcgcaatataatacctacaagaacgagtacggttcagactttaatgcttatcttcaaagtcaaaacttaactgaaaagtcattgaagcaacaaattcggtcaaacttactcttgactgcggctgctcgtcattactcccacattactaacaagcaaatcaataagcaatggaccaagtaccaacctaaagttcaaactgcgacgatccttgttggtagtaagtctgatgctgaagatatcattaaccaattaaatgactccagcaacaagtacaagactttcaagaagcttgctaagtccaagtcaactgatagtcaaaccaagaacaacggtggtaagcttccagcctttgataatactgataaccaacttgattcagcttacaagaaggctgcctttaagttgaagacgggtgaatatactacgaccccagttaagactgatgacggctaccaagtaatttacatgatcgaacacccagctaagggtaagaagagtcaacacatcaatgacttgaagaaccaaatcgttcaagaaaacatgaacaaccaaaacttcatgcggaaggttgtttcaaacgtcttgaagaagggtaacgtttcaatcaaggaaaacgatgttaagaatatccttgatgactaccttaactcaagcgccactacaagcagctccagcaataacagcagcagtactagctcaaataagtaaaatagggtataaaaataaggctacggaaaattttcgtaaccttattttttatgtgcgcccggcatgggtattagctaggcggtgagagtccgctatgggccgtagtagtcggaaccatgagctgaggacaagggtgtccactgcgaggtggaatctgaaggaagtctaaggcaaagtactgcaccgatgaacaagaagtagctataaggctggaactaactggataagactgcatgacaagttaaagtccaacactactcgaagttactttcagtaaagctaccggtgacatggtacgaaagttaatatccttacccggggagatctggcctacacgtttccgacaagaggaataagtttaatttccacagaaacaagcggtgcagtgatgtagcgttgagtaagccagaagtcagccgaggtcatagtagtctgagtaatcagatgaaggactgaacgacaataacttgtaacttatatcggaggtgtaatcaggtgcgacaatcgcagaaaacagaacaacaagctgaccgcttgtcgaggataggtttggaaaaccgaaagtacacaagggcgcgtagtaccgattatggtgaaggtaaaggtatgagtgtcactatccaagacttagtcttggaccgcaataaccttaatcaggcttatttgcgagttaagagaaataaaggggcagcaggcattgacgatatgacagtcaatgaccttctgccatatctcagagaaaataagacggaattgatcgctagtttgcgtgagggcaagtataaaccagcaccagtcaaacgggtagaaattccgaagcctaatggtggagtaagaaaactcggaataccaacagtggtggaccgaatggttcaacaagctgtggcccaaattcttacacctatctttgagcgtgttttctctgataatagttttggcttccgccctcaccgtggggctcacgacgctattgcaaaagtagtagatctttataatcaaggttatcgaagagttgtcgacttagacctaaaagcctattttgataatgttaatcatgacttgatgattaagtatcttcaacaatatattgatgacccatggacactaaggctcattcgtaagtttctaactagcggagtcttagaccatgggcttttcgctaagagtgaaaaaggaaccccacaaggagggccattgtcaccaatactggcgaatatctatctaaatgagttggataaagagttgactagacgtggtcaccactttgtgcgctatgcggatgattgtaacatttatgttaaaagtcaacgagccggagaacgagtaatgcgaagcattacccagtttcttgaaaagcgattgaaagttaaagtgaacccagataaaaccaaagtcggtagcccgctacggttaaagtttcttggcttttcgttgggtgtagaccacaatggagcctacgcccgtccagcaaaacaatcgcaacaacgagtaaagaaagcattgaggttattaactaaacgtaatcgtggaatatccctgacaagaatgtttgaagaaattcatcgaaaaatgcgtggatggcttcagtactactcaattgggaaactaactgactttattcaacgccttgacaagtggttgagggcccgaataagacagtatatctggaagcaatggaagaagcttaaaactaaggtaactaacttacagaagctggggctgtcccagcgtgatgcatatgtcttcgctagtacccgcaagggctactggcgaactgcacacagtaagaccttgagctattctctaactaatagaaaactggaacaactcggacttatgaatatgtccaagacgctccagtcaattcaatgtgattaagttgtcgaaccgccgtatacggaaccgtacgtacggtggtgtgagaggtcgataattgaactaatcaattatctcctactcgatttccacttcttaacatcacgttcaacatcgttaataaatttttgcacaccagggatggcagcttgtagttcatcgatgctgttcttcaactgtgaaacttcgctgctgagccgtttgaattcctcttgaatttcttttagccgttgcataactagtcttctttcatttgatcgatgattgattgttggatttctttgtacttttcatcgttgtagttaccagaattgtccttaaaaatcatcttaaaatcatcatcgctagtgtaccgtggaatcaagtggaagtgggaatggaagacagattgataagcgacttcaccgttattgttaaccacgttcattcccttgatagctgggttagaagccttgactgcccgtgcaatcttggggatacgggaaaatacttgggcagcaagatcagcatcgtaggcaaataaatcgggaacgtgcttcttaggaatgacgagggtgtgaccaggagttccctgtgaaatatcaaggaaggcctttacaacgtcatcttcatagactgtgtagctaggaatctcaccgttaatgattttgcagaaaatacaattattgtccatattaatcgctccttttgaagattaaacttatcctaagtataccgaaaaaatcgcgttcgtgcatgatttagtagaagaaataacctatgatataataaaaagatatgactaagcaataattaagaagggatgaataatggctttagagataaataaacttgttggtggatattcccagattcctgtgttgaaggatgtcagctttgatgtccaaccaggtgaattagttggtttgattggactaaatggtgccggaaagtcaacaacgctaaaccacgttattggcttgctgcgaccattttcaggatcgattaaaattaatggtcttactatccaggccaacccggaagagtataaaaagcagatcgcctatgttcccgaaacgccaattctttatgatgaattgactctccgtgagcatatcgatttaacgattatggcatacgagcttgatcacgatgcagcatggcagcgggcaacaaaactattaaaactttttcggcttgataataaacttgactggttccccgctaacttttctaaggggatgaagcaaaaggtaatgatctgctgtgcctttatgactaaggccaagttgctgatcattgatgaaccattctatgggctagaccccttggcagtgcatgatttgctagacctgattgagcaaaagaagaaggagggcgtcgcggttttgatgtcgacccacgtccttgatacggcgcaacggtattgtgaccgctttgtcctattggcagatgggaaagtccgggcacatggaaccctcgatgaattacgagccgctggtgatcatgccggcgaatccttggatgagatttacttgcatcttgcaaagggtgatcgtgatgaataagttatttagcaagcgtcgcagtcaacactttatgctcctgttgcgttactggcggctagtcttcaatgaccactttgttatcgccttatttttcctgttcggagctttggcatatggctattctcaatggctgccaaccttgggatcgcatgaatggtggacccggctgatcttgatcggctggtttacggtcatcgctcaaattggtcgtcttgcaacgctgatcaaaaagccggacccagtctttctcttgccgcaagttgaaggaatccatcgttaccttaaccaggcgacctggtatagtctgatcttagcggaaataatgacggtagtgggggcctttatcgccttgccgttcgctttaacaacggaaaaactcagcagtgccgagattgtgaccatctttttagtcaccattgtcaataaggctgattggatgcatgtagctcgtaaatcactgagtttgcgctggggtgatcaacagtggcggacccggctagaatactgggtaaatccgctccttgcttcaatcgcaatgtggctggtaaatccctatgtcggtcttgtcgtggcagtgatcttgtacttggcggtaattgtttattatcgtgatcttgccgttaattggcggattgccgttaaggcggaacaagatcggatgtatagtgtctaccgtttctttaacctctttactgatgtgccaagtgttcaaggaaataccaaacggcggaagtgggcagatggcttgatccgctggctaagcaaagatggtcaaccatggtcttacttatacgctcgcgcatttgtccggagtaccgaagtgagcgggattgtcagtcggttgaccctactaggaatggtgattgtcttcttactgccagcaggttggttaagtactctggtggtcgtgctctttatttacttgatcgcgacccaactgatgccactctatgaccagtatgaatcaaatgtctttactcacatctatccaatccctgctagtcagcaacaggcagactttaagcagctgttggccaaggtaacggcgcttgaggcactattgatcgcccttgctagtatcggttggcagttgaatgtcggccagatggtaattaatcttattattgcggcagtggaagtggtcttattaagccgtttctacttcaatgtcagagtcaaaaaactaatgaaatgaggattttaatttatgcgtgtgaaacataaaaagtgggctgatccattaattgctgcccatccagaactaatgattgatgatgccactcaatttaagggtaagtggcaatcacggtttgcaaaagaacaacccctccacttagaagttgggatggggaaaggtcaatttatcattggcatggcgaaggctcatccagaaatcaactttatcggattagagattcagcggactgttgcggcaattgccctcaaaaaagcacttgaggaagacttgccaaacttgcaattgatttgtggggatggagaagacttgcaagaatactttgaagatggggaagttgcgaagatgtaccttaacttctctgatccatggccgaagaaacgccatgctaagcggcgcctgacctacaagaccttcttagcaacctatcagcagatcctccaagatcaaggggtaattgaactgaagactgataacatgggtctctttgaattctccttggaaagcatgaataactatgggatgatctttgatggcgtctggttagacctgcaccacagcgaagaaaatgaacataatgttgagacggaatatgaacaaaaatttgcggcgaaaggccaaccaatctataagctaattgctaattttaagtaaaatactagtcagtaagtagacgaatgcttgctgactagtatttttttacttttttgctggggtgaggaatcgatttctttatagcaacaccaagtgaaaaagtgtatttaaaagtaatcccaccattaatgaaataataattttgtgtttatggttcgataaatatgtgctcgaatattttcgaaatataaataacaagttatgacgtacaaatatatggggggatattgaatgtcgaagaacaatgcacaagaatatgtacgcaaaatggagcaacaacggcaacgatttgggttaagaaaactcagtgttggtgttgcgtctgtgttactaggaactacttttatggtcggaggtacagtagcacacgctgatagcacacctactatggaagaagcaacaacagcaaataccgatattacgcagctggtttctacttctgttgtacaagctgataaacaaactaatgaggaacaaaacgcagccgaaaatactagtagtaattcacaaaaagaacaacaattaataaataaaacaagtgatgagagcacagatcaactgaataataaaaagaatcaagaactggtaaaggataacgagtatgaatcgattactaatttaaacaaaaataacgtcaatacacaaaatactccagttgaagaaagtaaggtttctcaatctgctaccgaacagaatgcaagaattgatttaacgtttgttgatgatgacgataacggaaagatagtagattattcagaatatttgccaagcgaagataatggtcatcattatgcatacggtaaagttggcgataaggttagtccgaaagcatacaataaataacggtacgatgatgacgtgtacccccagagttggaaatcaactctgggggtattttatatgaccaaaattagcgttaaaactaaacttaaagctgttgaagaatatgctaacggtaatgttgctttagcatcagttaggcataaatacgggattgctgaacatgatttccaaatttgggtgggaatttatgcaagatttggtaaaggaccattactcaatccacccaaagtaactggggattttcggttaaatctggtaaagtggaaacaagaaaatttggcgtcaatctcagaaacttgtattcactttggatatcgttccccaggttcagtgtatcagtgggaatgtctctataacaagcaagggccacaggctttactgagattgcgtcggggaaggaaacctaaaaatggtcaaacgacacgacaagaatcaagacaagcttcttcagctccaaaaacagaaccaaaccttacaaagagaaaacttattgttaaagatacaactcgatgcctccaaaaaattgacagccttgagaaagcatccaaaaaagaactcgcacaagtaatttatgacctcaaggctaaatacttattaaaggatttgatcgatgcacttcccatttccatgtcaacctatcagtattggcaaaatcggtttgaacatccggatgaggatgaagaagaacttaaagccgttattaaaggcctctttaactactaccaagctgaatacggcgtacgccgtttaagcactcaaattcgagactactatcgcttaattggtaaaaagacacctaatcataagcgcattcagcgcttaatgcatgaaatgggacttaaatgtatcaaatataatcggcgagtccgtaagtatgattcctctaagggaccaaatggcaagaaagctaagaataagctaaatcggcgttttatgagtaaccgtaaatatcagaaaatggtttgtgacattacagaattaaaggctcatgatgggcgaaaagtgtacttagaaattattaaggacttggcaactaaccagattcttacttggtcaatcagtcaacatccaaatcttcaattcgcattagatccactccagcaattacttaagcagttacctcatacaggataccaattaattttacatactgatcaaggctggcactatcaacatcgtgcttggcgcaaactacttcgtcagggaaacattaggcaaagcatgtcgcatcgagcaacctgtctggacaacgctgcctgtgaaacagtctttagtaaactgaaagcagaaattggtcctgataccagttatcgcaatcaagaagaattaagccaagcaattaatgaatggattcacttttacaacgaacgccgtattcagacaaaactaggcaaccaaactccacttcaatatgagcagaatctagttgcctagaaaaatatttattcaattttaaagcaagaacatacaggttccaactttaagggtacacgtcaatttttttattatttaatgtgtaaacttgacagggcacagtaccgcgcctgcttctaattttttatcatttgtgacgtcaaaaaggtaaacgccaagttaataaggatcaacttttgctaaagcgggaatatatgtcgctacctgtccttcgccaattttgctccaacattcttgaattgcgtcattaagattcatgatagttctcctttaattaaaaaagctgggaaaatttgtccccagcctttactttagttattctcaatccgttttaattctaatagactaccagtatatgcatcagcaataaactcgtaatctacttcttcgccatcttctagacgagaaacgccgccttcataagcatgggttttaaccgcaaatcgttgaaaaggtattgctttatcattgatccagctaccggttaaagaaccttcacttgcaaaatcgtttttgactaattttaagatccgatcagcagatatttggcggttaccaaaaagtttaccagcgataaaaccggcgattccagatgcacctaatgtgactggaatcagccaggggttgagggagttattgtttgcattcatatgattgcttccttcactatttaaatttaatccgttcttaacttctcatttattctatcatttttaattattaaaatccaaatatctagtccttgcaagcagagtacttacaatagataagaagcatggtataatattgctaaaatgatatagggatgaggattatgaaaagattaccacaattaaaagaagatcaattaattgaaactattggcaatggcaaggtcgtccttttctttacagctgattggtgcccagattgccgtttcattaagccagcaatgcctgagatcgaacaagacttcagtgattatactttctatgaagttgatcgcgatgaaaacatcgacctagctgctgaattaaatgtatttggaattccaagcttcattgtatatgataatggtaaagaaattggtcgatttgtcaataaagatcgtaaaactaagcaacaagttgaagattttttaaacaatttgaagtaaaataagaaggctgtgaaaataaagagactgaattattcagccttctttagttttaaattagattttcatagtcttctttttatgtaataatataaaatggtagattatattagagagaggaatatttgatgttaatttcaagttacaatcccaatgaattaggcgacattttagtcgttattaccgctccagatgcggatgaccaaattactaagattgctgatgatgtagctcagatcaccgctgaaaaagatggtgcattacttggctataactttatgaacgccagcaagatcttaccagaattaacaagtgaaaacgggcaagtatttttagatgcagcccaagttgaaaaattaaatgcaaagttacaagaagcgggctttgataagctcttaacggctgacgaagatcctaagtttgtggttggttatgttgaaaagatcactgaccatcctaagtctgaccacttaaaagtaacgcaaacgcggattgctgatgataagactgtccaaatcgtgtgcggatctcctaatgttgcggaaggtattaaagtggtagtcgctcgtcctggtgcgatgatgccagacggtaagatcatttggcctggtcaattgatgggtgtcgatagtgacggaatgctctgtggtttccgtgaactacggattaagaatgctcccgatgaaaagggcctattcattatccctgatgactggcaagaagtcggtgaaccggttgattttgctaaggccgatacgttttacccagaaaactaacaaaaaacagctgattactattgccaaaattttataatgctttattatttagtgagggatggatcatagttactgatctacccctcgcatttattttaaattgaattgttgaaaggaattggattgatggaacaaaatacatattactttgttggtattaaagggaccgggatggcctctttagcacgtatccttcatgacaaaggacaccaagtactaggttcagatattgaaaaggaaacatttacacaagcgccattattagcggcgggaattaaaattttgccatttgatccagccaatttgaaaccagggatgattgttatccaaggaaacgcttttgatgatgatcacccagagattaaacgagcacatgaattaggccttaaaattttaagctaccctgaggctgttgaaaatgaggttaagaatcatactagtattgggattgccggagcacacggtaagaccagtacgactgcattgttatcacacgtattagcagcggttgaaccaaccagctacttgatcggtgatggggtaggtaaaggaaatgcggatgcacgcttctttgtttttgaagccgatgaataccgtgatcacttccttgcctaccacccagactatgcaattatgacgaacgttgactttgatcaccctgattacttcaatgatttggcagatgtccgtgattcatttgaaacgtacggtaagcaggttcaacgggcaatttttgcttggggagatgatcctagtcttcgtaacttaaacgttgatgttccggtttactactatggaactaatccagatgatgatttccgggcagaaaatattcaacggacaccagaaggctcaacatatgatgcttacttccgcgaccaaaaactcggcacattcactatccacttatacggtgaacacagtgttcttaatagcttagcagtactagcagttgcatacatggaacacatgaacatggatgagattcaacaggaattagccaactttagtggggtaaagcgccgtttcagcgagactgacattgcggatataaccattattgatgactatgctcaccatccaagcgaaattaaagcaacaattgatgcggcacggcaaaagtatccagatcgtgaagttatcgctgtttttcaaccacacacatactcacggttggctgcttacatcgatggctttgcagaatcgcttagccgggcagataagacttttgttaccccaatctttggttcaattcgtgaaaatgctggaaatgtttctagtgctgatttggagcaacggattgacggtagtgaaggcattgacatggataccatggataaacttttgcaataccataatgcagtagttgttttcatgggtgccggtgatgttgaaaagtacgaagaaaagtacaaagaattgttaaaataattaaagatttacttgaacgaaatggtggcctctgctaccatttttataattagtcaaataaagtcaaattaaatagaaagagggagttttgatgaataacttttctcaagaaccagggcgtcgggttgtcactgacgcagctggcttgaatagtttcttgacccgaatgtatggaaacatgacgctggcagttcttgtttctgcattcagtgcttacttgaccatgggggtattccggagtgcggttttcggtttctttagtgctcaccctggaatggtttgggttatcttattgctaccgattgctttgtcaatgggggtaagctttagtgctacccggaacccagttggggcatttattatgctgatgctgacggcaataatctatggtgtcgagtttgcaattattgctggtgtttattcgggagcaagcattgcctcagctttcgtatcatccgcagccgtttttgtcacgatggctttgtatgggaccattactaaacgcgacttaagtaagtttggtgctcacgcgatggctgccttgattgctttaatgattgcttaccttatcaacatgttcttacaaagtcctgccattgcttacatcttctcctttatcgctgttattatctttactgttttaacagcttgggatgcacaaaagatgaagcaaatctacatcaactatggtggcgaagtatcaacaaatggtttagctgttctaggtgcccttcaattgtacttagactttgtaaacctctttatctcacttctccaaatttttggaatgagtgaccgaaattaattaaaagtgagtgttttgcacgttatcttgttattatattgcaaaatagtaagaggctgttgaaaaacaaaagtttttctcagcctctttactatatttaaaaactacttattaacgtttttccttttagttaaataataagaactatcagttacgagaatcaagaacgttgcgatccagatagttttcattcggaaaaagggaagcaactgagcggaaatgatcgcgccgagcgtaaaacagatcacgatcattaaataactaaaggccactgagcgttgcgagcgatcgtgatgaaaataatattcgctccaggcaaccgcagcttttttaacactgccacttgtaaagacactgttatacccaagcccctcgattttgctgaaagcggcactttgcattgcaagcccaaatgaaacagctggtaccattagataatcaggaaagctgtcaggaagaaaaccgataattgctcctactaataaaattggcaataaacaaactactcgccaataatcagtttttaaatgagcatggagaatactaaccattgctaatccaacaataaatgcgatcaatgaacctagccgatcaaccacgccaaggaaattgtggtttgcgagcgcagcgctaagaaaaatgatattaccggtttgggccgccgccattgttcgcccacatttgatatatgtaaaagcgtcgatgaaaccaccactaaaggtgagaaggagggcaaagagccgtgcttctgctggcttttgatagttaatgagtttatccatgaatttcatctcgcatctaatgtttttcattttaattataacttaaatctttggtcaagaaactaaaccattgctatattctctggtacaattactattagcgatagaagggcgggaattaaatgacaaaacaattattgttaattgacggaaatagtattgttttccgggcattttttgccatgcataaccaaatggacaagtttacaaataaggacggcttgcatacggctgcaatttatggctttaagttgatgcttgaccatgtgttgcaaaactttaaaccggatacggctttagtagcctttgatgcagggaaggtaaccttccggacgaaaatgtatgatgactataagggtggtcgaaacaagacgcctaatgaattgaccgagcaaatcccttatgtgcgtgaattgatcaaagactctgggttacatagttatgaattagctaactatgaggctgacgatattatcggtactttggctaagcaggcggatgatgctggctacaagacgttgatcgtaactggagatcgggaccttacccagttagcaagtgaaaatacaaccgttgccgttacccacaagggagttactgacacggaacactatacgccagcgcatgtcgaagaaaaattaggaattaccccacgccaaataattgatatgaaggcattgatgggtgattcttccgataattatcctggtgtaactaaaattggagaaaagacggcgatcaaacttgtgaaacagtttggttcggttgaagagctttatgaccatattgatgacctcaaaaagagtaagatgaaagaacatttgattgaggatgaagagattgctcgccaatgtaagacgttagcgacaattcttcgggatgctccgctcaagattggcctagatgatttgcaataccaaggtccacaaacggatgacttgattaagttttacaaagagatgggctttaaatctttcttgaaaaagatggatatcgatggggctggagaggaagacgaagctgagattgctccaattgactacacagttttaactaaagataacttagatgaactaggacaattaacgggtgaagtaagtttttaccttgaaatgccagcagaaaattaccacacgtcaccattcgctggttttgtgatcggcaatgaaggacactggtttacgagtcgagatgtggacctgcttaaagaggcgcctctcaaggatttactccagagtgatagtgttaagaagaatgtctttaatgccaaggcacaaatcgttggacttcatcgcctcggtattccgcttgaaaatattaattttgatctgcttttggcatcttaccttctaaatactaatgacaatagtaacgacctgggacaagtagctcaggaacacggttatgatgatgtacgaacagatgaggaagtttatggtaaaggtgctaagcgtgctgtgcctgatgatgacgagaccttctttagtcacctggctacgaaagcgcgggcaattgaacatctgcgtaaggatttttttgccaaattagatgaaaataagcaaacgccgctatataccgatattgaattaccgctaacccgggttcttgcaaaaatggaaatcgcgggtgtccatgtagatgcacaaactttgaaagatatgggtagtaaattaactgaacggctatcagaaattgaaagtcagatctatcaagaagctggcgaggaatttaacattaactccactaagcaactaggccatattctgttcgaaaaattgaaattgccagtgatcaaaaagaccaagaccggttattccactgcagttgatgtgctggaaaagttagctgataagtcaccgattgttgagcaaattttggaatatcgtcaaattgctaagcttcaatctacctatatcactggtttgctgaaagttatccattcaaatgaccagaagatccatacgcgctacttacagacattaacgcaaactggtcgcttgtcttctgttgatcctaacctgcaaaatattccagtacggttgccggaagggcgcttaatcagaaaggcatttgttcctagtcatgaaggttggcaaatcttctcttcagattattcgcaagttgaattacgggttcttgctcacatcactggtgacaagaaccttcaggaagactttaagaatggtgaagatattcatgctagtacagctcgccgaattttccatctagcccctgatgccgagattgaccgtaatatgcggcgtcgggcaaaagcagttaattttggaattgtttacgggattagtgattacggactggcacaacggattcatgttagtcgtgcagaagctcatgaatttattcaaaattatttccatgaattccccggtgtaaagaaatacatcaatgacacaattgcgtttgctaaagaaaatggttatgttgagacgattactcaccgtcgtcgttacttaccagatattcatgccaaaagttttagcaagcgatcatttgcagagcggactgcaatgaatacgccaattcaggggagcgctgctgatatcattaagattgcgatgatccggatgcaagatgagcttgagaaacgccatctaaaggcaaaaatgctcttgcagattcatgatgagttagtctttgaggctccaaaggaagaaatcccgattctatcggaattggtgccaaaagtaatggattcggccgttaagttggatgtgccacttaaagtagatagtaagtatggggatacctggtatgaccttaaaaaatagatcggaggaattaaatgcctgaattaccagaagttgaaactgttcgccacggtttgctgaagattgccgctaagcgtaaaattaacgcgatcgatgtttattatggtaaaacgattaccaatgacgttgaagattttcggcaggcgttgattggacagacgattgaaaatgttgatcggcgagggaaatatcttctttttcgttttactaatgatttgacgatgatttcacaccttcgcatggaaggaaaatattacaaccaaccgattggcggaccaattgataaacatacccatgttgtctttgaatttacggacggcacggaattatgttatcaagatacccgtaaatttggtcggatgacactggtaaaaaccggtgatgagatgaatgtcggcggattgaagacgattggccctgaaccgacggaagacgcctttacgttgccatactttacagctgaattaaaaaagagtcggggaaagattaagccattcttgcttaatcagcgtcatgtcgccggtctgggtaacatttacgttgatgaggtactatggatgacggggataaatccggagcaaccagccaatactttaacggctagccagattactgaattacggaaaaatattatcaaagaattggcgacagcgattaagtacaagggaaccactgtgcatagttttacgaatgcatttggtgatgccggcgctttccaagatcgcttaaaagcttatggtcatgcgggggatgaatgtccgcgttgtggcacgaaaatggttaaaattaaggttgctgaacgtggaacgacattttgtccacactgtcaagtattgaaggaataagaaatgacaaaaatagttggattaacaggtggaatcgcaaccggcaagacaacggtaagcactattttgcgccaggctgggattccggtgattgatgctgaccaagtagcgcggcaagtccagacaccagactcggttgggttaacacggattgtcaaagtatttggtccgaaagtacttttgccaactggggagctcaatcggcaaaccttagcaaaaattgtctttaatgataaagaagcgttgaaaaaactcaatgagattcttcagccattaatttacgatgctatctttgcgcaggttaatactttaaaaaaacagggtattccgctcgtggtgttagatgtaccattattattcgagcaacattatgatgaagattgtgattatgtggtagttgtttatactgatccacaaacgcagcttaagcggttaatggctcgtgatcattgttctaaagaggaagcgcaagcgcgaattgttgcccaaatgccattatcagataaagaagcgcgggcggattttaaaataaataataatggtgaccaggctgccctgcaaaaacgagtcgcatccctaataaatcagctaaaagcagagtaaatgtggtaaaataaagtacttatactataaaggagggggacacattgcgctgtccacattgtcacaaaaatggatcacgggttgtcgatagtcggccaagcgaagacggaagctttattcgtcgtcgtcgtgagtgcattcattgtggctttcgttttacaacctttgaacggtacgaggaaacgccactactagtaattaaaaaagatggcacgcgccaagaattcagtcgccaaaagatcctcaatgggattgtgcgctcggcagaaaaacgaccggttagtatggagcgattgaccaagattgcagataaagtggaaaaacaaatccggagtattggtgaaagcgaagtctccagtcaaattattggtaaatttgtgatgaacgaattaaaaggcgtcgatgagattgcttatattcggtttgcaagtgtttaccgccaatttaaggacgttgatgcctttatgagcgaacttgaaaccatgatgaaggcagaacataaaaaataacttaggagggctgtaaaatgactgcagcagcttttgacccgcaagccggttatgttgttacggccagcactgcatttattagttttaatgaccagacttttgcaacattttatcagccaattttaggaccagttgcgtttagctttttttatgcgttaaaagcgcgcttgctgcctaatcctacgattgctaaccggaccttgcaaagtgacctgttagcccaagtaaatgctgggggccgacaagtactggaggctcttcatcgtttagaggcagttggcttagtgcaaacttatttccagcacgatgagatcggggacgtatacgtttatgaattgcagccgacccttactccagaaaaatttttagctgataacttgctgagtattttacttttagaggaagtaggagaagatgcgtttggacgtttgactaagcaaagtaggcaatacaagcttgcttcttctaatacttcactaactaatgtgagtcacaacttttttgaagaatttcatattaactcgcagtcaattactgaaacaccacaagcgattttaacggcgcgaaaacaggcaccagtagaaaagcaaccccagttaactgcggggataagcgatgactttgattggtcaaccctcattcacttgctggctaatcagccgattgtcagtgcagaccttgaaaataatcgagacctaatattattagaacatcaattatatgggattgatgcgccaacgatgaagacattggttttgcggtcgattgatctgcaaaccaatcatttcaatccgaaaaaatttaagcaaattgttgcgtctacctataatattgtctattcttcaacgacaaaagtagcggaaaaagaagcgccggtgacaaatagaaatagtgaactgactagtaaagatcaggagttattggcgacagctaaggattactccccagtcgaatttcttcaggttcttaaaggtcaaacgggtggctacgtaacttcaggtgaacgtcatattctgacaggtttagtagcgcaagaaaaacttacccaagatgccattaatatcttaacttggtatgtgattagtgaccggggaaattctactttgacagctaattttgtcgatgcaattgccaataactggctccaacatggagtaattaatggggaacaagccattgtccaattaaagacttttaacaagcagtcgcaagaaaagaaaaaggaaacaaagacgccaaagaaaaataagtggcgcaaaacgattaaggaaccgatgccagcatggagcaagaaagacacgagtgagttgatgaaaaaggcttcctcacaagaaattgccaaactgcgtgaacggatcgctaatcgtaagaagaagtagcagctaaaggaggtggcagcatgcagtcactaaacaaaactttacaagagttaatgcgcggtcaaaatatagcaaacaatatccaacaaacgatgaagcaagtttatgcggataaagatgttcaagcattcttaaacgaaaatcgtgaccgtcttagtaaagaagcaattaaacggggacaatcaaagctttatgagttttttcatgaaaagcaattaattgaaaaaggcgtgccaactgttgcccctggatattctccgcaattggttatcagtgcaggccaaattgacgtaacctacgttccaactaaacagttattagaacgccaacgacaacgttatattcaacgactagttaactcgattaatatgcctaagttcattaaaaatgcgtcatatgatgattattatttaaatgaagatacccaaactgatacacgcacaaaggcaattcaagcagccatggactttacagataattaccaaaaagataattttcaaccaggactttacctatatggaaaattcggagtcggaaaaacatacctccttggagcaatcgctaatgaactcgctaagagtaagggagttgcaacaacgatggttcatttccctagttttgctgttgaaatgcggaattcaattaagcaaaataatactggcgaaaaattggatgctattaaacgggcgccgattttaatgcttgatgatgttggggccggtgcaatgacaacatgggtaagagatgatattttaggagtaattttagaatatcggatgcaagaagaattaccaactttctttagttctaatttttcaatggatgagttgcaaaataaccaccttgctatcaatgcgcaaggcgataatgagcccctcaaagcggctcgcattatggaaagaatcaagtacttatcacgtgagattgaaatggaaggaaagaatttgcgtgataagggataaagttcttgacattaaactttgaatttagtaagctaataaacgttgaaagaaaaagcagaagcacccgcttctcgcctaggtgatattgatcgccgggctgacgagatgaatgataatcgaccactatgataaggtcgttgttatgaagcggggtacttttgtacctcgcttttttgcttgatctttcgctaaaaaaattggaggtgcgttgccatagcacaagatatgattgtcaataacggtattcgtgcacgggaagtgcggttaatcggtcaagatggtgaacaattgggcattaagtctaagcgtgaagcgctacaattagctgaagaagctaacttagatctagtattagttgcaccaaaggcacgcccagctgttgcccgcattatggattacgggaagtaccgtttcgagatgcaaaagaaagagcgtgaagctcgtaagaagcaaaagacgataacggttaaggaaattcgccttagtccatcaattgatactaatgactttaatgttaagttaaagcgtgttcgtaagttcattgaaaagggcgataaggtacggatttcattacggttccgtggtcgtgctattacccataaggatatcggtcgtgacatgattgaacgaatggctgaagaaacttcagacatcgctactgttgttcaacgtccgaagatggaagggcggagtattttcttaactcttgctccggctgctgataaagcaaagaattaatttaagaaggtaggaattagttatgccaaagatgaagagtaaccgtgctgctgccaagcgtttcaagcgtacagctaatggtggattcaagagtggaaactcattcactagtcaccgtttccacggtaagactaagaagcaacgtcgtcaattacgtggtttgagcatgatggacaagaccaacgtaaagcgttacaagaagttattaccatttaagtaaacttcacaaaaataactatttaatatacgtaggaggatttcaacatgcgagttaaaggtggaactgttacgcgtgcacgtcgcaagcgcattatgaagttagcaaagggttaccgtggttcaaagcaccgtcttttcaagactgctaaagaccaagtaatgaagagttacacttacgctttccgtgatcgtaaggtcaacaagcgtaagttccgtgaactttggattgctcggattaacgctgctgcacgtatgaacgacattagttacagcaagttaatgcacggcttaaaggttgctaacattgatattaaccgtaagatgttagctgatttagctgttaacgatgcagatgcatttaaggcactcgttgacgaagctaagaaagctcttaactaagcctaaataatcttcggtcgcttatgatgcgtatgcatgataagcggctttttttagtgcgcccggcatgggtattagctaggtggtgaaagtccgctatgggccgtagtagtcggaaccatgagctaaggacaagggtgtccaccgtgaggtggaatctgaaggaagtctaaggcaaagtactgcatcgatgaacaagaagtagctataaggctgaaattaactggataaggctgctagacaagttgaagtccaatactactcgaagttggtctcagtaaagctaacgatgacatggtacgaaagctaatattcttacccggggagatctggcctacacgtttccgacaagaggaataagtttaatttccgcagaaacaagcggtgcagtgatgcagtgttgagtaagccagaagtcagccgaggtcatagtagtttgaataatcatatgaaggactgaacgacaataacttgtaacttatatcggaggtgtaatcaggtgcgacaatcgcagaaaacagaacaacaagctgaccgcttgtcgaggataggtttggaaaaccgaaagtacacaagggcgcgtagtaccggttatggtgaaggtaaaggcatgagtgtcacgatccaagacttagtcttggatcgcaataaccttaatcaggcttatttgcgagttaagagaaataaaaggagcagcaggcgttgacgatatgacagtcaatgaccttctgccatatctcagagaaaataagacggaactgatcgctagtttgcgtgagggcaagtataaaccagccccagtcaaacgggtagaaattccgaagcctaatggtggagtaagaagacttggaataccaacggtggtagaccgaatggttcaacaagctgtagcccaaattcttacgcctatctttgagcgtgttttctctgataatagctttggctttcgtccccaccgtggggcccatgacgctattgcaaaagtagtagatctttaaaatcaaggttatcgaagagttgtcaacttagacctaaaagcctattttgataacgttaatcatgacttgatgattaagtatcttcaacaatatattgatgacccatggacactaagactcattcgtaagtttctaactagcggagtcttagaccatgggcttttcgctaagagtgaaaaaggaaccccacaaggagggccattgtcaccactactggcgaacatctatctaaatgagttggacaaagagttgactagacgtggtcatcactttgtgcgctatgcggatgattgtaacatctatgttaaaagtcaacgagccggagaacgagtaatgcgaagcattacccagtttctagaaaagcgcttgaaagttaaattgaacccagataaaaccaaagtcggtagccctctacggttgaagtttattggcttttcgttgggtgtagaccacaatggggcctacgcccgtccagctaaacaatcgcaacaacgagtaaagaaagcgctgaagttattaactaaacgtaatcgtggaatatctctgacaagaatgtttgaagaaattcatcgaaaaatgcgtgggtggcttcagtactactcaattgggaaactaactaactttattcaacgcctcgacaagtagttgagggtccgaataaggcagtatatctggaagcaatggaaaaagtttaaaactaaggtaactaacttacagaagttggggctgtcccagcgtgatgcatatgtcttcgctagtacccgcaagggctactggcgaactgcacatagtaaggccttgagctattctctaactaatagaaaactggaacaacttggacttatgaatatgtccaagacgctccagtcaattcaatgtgattaagttgtcgaatcgccgtatacggaaccgtacgtacggtgatgtgagaggtcgataatcgaactaatcaattatctcctactcgatttagttgctttccgagtaaagcacacgatataattaaatactagaacatttaatcgggttaaccgattggaatattaaatttgatgaggtgcaactttgttagagatatttaaaccaacatggatggttaatacaatatattctgtttctcctgcccaattaaaagagcagggagtgcgagctgtttttagtgacctggataataccttgattgcttggaacaatccagatggaactccagaattaaaggaatggatggattctttacgagaagcccatattccgctaattgttatttctaataatagtaaggaacgagttgggaaagctgttaatagccttgaccttccatttgtttcgcgatcattaaagcccttaagttttgggattgatcgtgcacggaaaaaacttaatttagcaaaagatgaagtggttatggttggtgaccagttattgactgatgttgctgcggctaaccaagcgggcattcgaagcattttagtacgccccctattaaatacagataagtgggatacccgtattaaccgcttctttgaacgccgtgtttggaagagcttaaacaaaaaatatccagatttaaaatggcaggaggatttgaatgactgaacaagaacaacaaactgaagaattacgttgtataggttgtgggagtattatccaaacggaagatcctaatggcttgggttatacgcctaagtcagcccttgagaagggaaaggagacaggagaattatactgtcagcgttgtttccgcttgcggcactacaatgaaattgctccggtatcattaacggatgatgactttttgcgcctattaaatcagattcgggatgccaatgctttaattgtgtatgttgttgatgtttttgactttaatggaagtctaattccgggcttacatcgttttgttggtgataatccagtattattagttggaaataaggaagacttgttgccacgttctctacggcggcccaagttaactgactggattcgtcaacaggcaaatattgccggattgcgtccaattgatacggttcttgtttcagctaaaaagaaccatcagattgaccacttgcttgatgtgattgaaaaataccggcacaatcgagatgtttatgttgtaggtgttacaaatgttggaaaatcaacgttaataaaccaaattatcaagcaacgaacgggagtaaaagaattgatcactacttcacgcttcccaggaactactcttgataagattgaaattccgcttgatgatgggcatgttttagttgatactcctggaattatccatcaagaacaaatggcccatgtcttatcgccaaaagacttgaagattgtggcacctcaaaaagagattaaaccaaagacttaccaattaaatgatggtcaaacattatttttaggcggcgttgcgcgatttgattatcttcatggtgaacgtgcgggaatggttgcttactttgataataatttaccaattcaccgtacaaagctaagcaatgctgataatttttatgctaaacacttaggagatttgcttaccccaccgactagcgatgaaaaggatgggttcccaccattagaacgttatgagttccacattaccgaaaaaagcgatattgtctttgaaggtctaggatggattactgttcctgcgaaaacgactgttgctgcatgggttccgaaaggtgtcggggctcttgtacggcgcgcaatgatttaattagtatttgaaaggaaagacttatgcaattaagaggaaaacaaaaacgatttttacgagcacaagcaaaccatcttcaaccactattttctgtgggtaaagatggtctgacggacaattggcttgctcaattagacggcgcacttgaccgtcgagaattaattaaggttagcattttgcaaaactcagatgttacaactgatgaagttcgcgaattaattgaagaaaaaacttctattcaggtagttcaagttattggtcgggtattagttttatttaaagtttcagcaaataaggatgcccgtgaattatcatcacgagtagctgaaatctaagtaaaagtaggagtgacggttttgcaaagctgtagtgtagtagacaaggtgcaaacccaggcgcaaccggagactaaagttagtggacaccgtaagcggatcggcctctatgggggaacatttaatcctattcacaatgctcacctatttatggcggatcaggttggtcatgccctttgtcttgatcgagttgattttttaccagatgctaaacctccccatgttgatcataaagattcgcttgatccgcaattgcggttacagatgctcgaattagcagttgctgataacccctttttagggattgagtataccgagttagagcggggaggagtcagctatacttacgatactattaagtatttgttagataagcaccctaatgtggattattactttattattggtggggatatggtcgattaccttgacaagtggtatcggatcaatgatttaatccgcttaccccatttccattttgtcggtgttcaccgtcaaggagcgaagaatgagacacgatatccagtgatttgggtagatgtcccaacagttgattttagttcaaccgatattcgacaacgggtgcaacgtggccaatcaatcaagtatatggtcccagatgccgtaagcaagtttattgaggagcatcaattatatcgtgaatgaagaattagtttataataaaagttatatcccaatgacacggtctgaacttatcgaccgtctcaaaaaggcgttaaagaataaacgatttcagcatgtattacgtgttgagaaaacagcgattgagttagctgctcaatacggtgttgatattgaaaaagcaagtatcgctggcctgtgtcatgattatgctaaacagcgtcctgacgaagattttattgccgaaattaagaaaaaagggcttaatccgctgctcttagattatggtaatgcaatttggcatggagtggttggcgcagagctaattaaggatgaattagggatttgggatgaagatatcctaaatgcagttcgccaccatactactggagcgccagtaatgacgaagctcgagcaggttatttacatggctgactatattgagccgggtcgtgactttgccggcgtaaaaaaggcacgagtaattacagcagcaaaccttcaagcaggagttgcttaccaaacaaaacatacgctggcttatttgattgaaaatggaaagccggtatatccaaagacaatagatacctataatgcatgggttccgcaatatgaaggagagatagattaatggatagtaaacaattattagaaatggttgtcaaggctgccgatggtcggcgcgcagaagatatcgtcgctcttaaagttgatgaaattagtccaatggctgattatttcgttattatgacgggaggctcagaccgtcaagtacaggcgattacgaatgccattgttgaaaaagcgcatgaagaaaatgtcaaaattggtagcgttgaaggtaaaaatcatgctcaatgggtattggttgaccttggtgacgtggttgtccatgttttccgtgaagaaacccgtcaattctataaccttgaaaaattatgggccgacgcaccccttgtcaatattaacgactggattaatgattaatgatttatcaaagttttgcccagttatatgaccagctttttgatcctgaaatgtaccagaagtgggaaaagttcacaattaaaaaccttcctgctaatactaagagcattttagatttagctggcggtagtggacggttaggagtaatgctggctgctcgtggatttgatgtaacggttgctgacttttctgctgagatgctcagtattgccgatcaacatgccacggaagcaggagttagtatgaatctcttgcaagctgatatgcgggacctcagtgctttaccgcagtatgatgcgatcacttgttatgcggactctttttgttatttagacgatgcagcggccgtgcaaaagaccttcaatgaaattgctgatcatttgaaagataatggtgtctttttatttgatgtcatttctccttatcaaactgatgtcatttatccggggtatatgttcaactatgaggataaggatcatcagcgagcgttcatgtggcagtctttcaaagatgatgatgttgagcatggcgtaattcacgaattagcttttttcactcgagataatgatggacgttatgatcgtgttggagaaacccattatgaacgtgcttatgaattgcctttattaaagcagatgttatctcaagctggttttaattctgttgaagtgggatcaaatttttcgacttctatcaaagaagaaaaaccaacacgatggttctttaagtgtcataaataaggagagttcacatgaaagcagtagggatggttgttgaatataatccatttcacaatgggcatcgctaccaccttcagcaagcgaaaaaaatttccggggcagatgtaacggtagcggtaatgagtggtaattttacccagcgtggtgaaccgacaatcgttgataaatggtcgcgggctagggctgcagtgatgaatggcgtggaccttgtaattgaactaccggttttttatgctgtccaaccagcacaccggtttgccggaggagcgctgagtctcttaaatgctcttggcgttgactcgattgtctttgggagcgagcatccagaatgggattttgcccgtttggtgaaggctgaagaagcttttaaccaggaaagttttaataagtataatgcaacctatgccacccaatttaacgagcaattgaaggaacaaactggtgtcaccctgattgatcccaatgatattttagcttttgcttataccaaagctaaaatcaaccagggttatcattttgaattgctgcctatcaagcgacaagggagtaactatcacgaccagcaaatcaaaggaaagattgcgagtgcgagtgcaattcgtcaggcaatcaatgaaaagggcgattaccggcaagctgttccacaagtgatgggagatatattggcggcaataaagagtattccttcatggacagacctttatcctttattacgtaatcagcttattcaagcgcctgtttcaacccttcagtcaacttatctaatggcggaaggattagaatatcggatgaaggaagctgcccagcggagtcttgactttaattcgtttatgaaattcaccaagactaaacggtatacttatgcccacttattgcgagtttgtttatacactatcttgcagattacccaagaggaagtagctgagcatagtaaacatccttatcttcatgtcttggcctttaataagcaaggccgtgaataccttcatgaggtaaaaaaacagcttgatctaccgctgattacaaaagtcgaccaagaaatgcgggatcaattgcttaaccttgattaccgagcaggaaaactatatcagttatttacgccggctgaacaagatttaaagcacccgccgataattattaattaacgtctttgataaagtttggtaaaatattctaagtagatttggttccctaaaaggttgtcaaggaaaaaacattgacaacgtataaggggactagtataattgcacatgttgcattaggaggttagtacgttgaaatggtcgttagctgaattacatcgttaccaagatgaaccacttcatattcaaagtacttttgatctgaacgcatcattaacgaagctgtttccagatattattttagctgttcaaccagttaaagttgatggttacgttacttatgacgatggtgatgcaacgattagcgctcatgttacaacgacgttaaccgttccatctagtcgctcgttaacacccgttcaattaccgctcgattttacgttctcagagacgtatatcgatgatcgttcacactttgcccgctatgaggatgaagatgaggttgttttccttattaaaaagggtgattcaattgattttgatactgcattagcggaaaacatcgttgaacaggtaccgctacgggttctttctgccgaagaaaaatctggcaaaccaatgccaaatggaaaaggttggagtgttatctctgaagatgactacaaggcccagcagcagaaagatgacaaagttgatccacgtctcgctaagttgcaaaacctttttcctgatcaggataacaaaaaatagcggacggttaaaaaccatttgtggataattctaatttcttaggaggtgtcaaacatggctgttccagcacggaagacttcaaagactaagaagcgtatgcgtcggggtcacatcaagttaaatgtacctggccttaccccttgcccaaactgtggtgaacttcgcaagtcccacatggtatgcccaagttgtggttactacgacggcaagcaagttgttaacactaacaactaattaatataaaagctatcctttaggcgccggacctaggatagtttttttattttaaaattttctaagaatttacaagtgaaaaatgatataatctaattccttgataaatcgagatttttagtatagagaatactggggtttattaaaaaattgtgataaaattattgtgttttattaatacgtataacaagtaaaaaaagattattatagtaggtgagttattaatgagtcgaattttgattattgaggatgaggaaaatttagcaaattttgtagaacttgaattaaagcatgaaggttacgatacagatgttgaacttgatggtcgtgctggattagaagcagctttaaatcaagattttgatgtgattttgctagacttgatgctcccagagttaaatgggattgaagttgcacggcgggttcgtgaaataaaagatacaccaattattatcatgaccgctcgtgattctgttattgaccgtgtctctggtttagatcatggggcagatgattatattgttaagccatttgcgattgaagaactccttgcacgggtccgggcgttattgcggcgaatcagtattgaagatggtaataataaggaacatcaaacaacggtcaattacaaggatcttaccattgaaaaagagaaccgggttgttcgtcgcggcgatgaagtaattaaccttactaagcgggaatacgaattactgttgatcttaatggaaaatatcaatgttgttatgtcacgaaaagaccttttgagtaaggtatggggttatgattccaaggttgaaaccaatgttgttgatgtttatattcggtacttgcggaataagattgaccgtcctggtgaaaagagctacatccaaacggttcgtggtactggatatgtgattcgctcctaggaatgatcaattatgaagcaaaaagatgaaagacggtttgtttcactaaaaattaagtgggcagctggaacggcattagggtcattaatcatcttttgtatcgttgcgatggcattgtttagcgcgtttacgcaaaatttatttcatcaagaaagacaattattgaatcaagggatgactaatattagtacacaattaagtactgttgataagcccttaactaaaaagaatgttagtcaccttattgatccagacagaaaccggtcgaatattatttctggagaggaatataaacgaccggtaattaaagagttaagtgatggacacttggttattaatatttataatcctgatggaaagaatattttgagtactggtcgttatattaaaaagccgcagtttacgactaatcgcaatattcatattgctgctgggcctgatcatgatgtgttggtcgggcagatgccaatttatggtcagaataatcggcagttgattgggtacttacaagttgaaaataaccttgacgcttatatgcaaagttatcatcagttggcattagtatgtatcttggctctctgcctggttttgattgcgagtgggctattgggatactttctttccctctttctccttcgaccattggatggaattcatgacacagttaaggagattagtgcagatcctactaaagatgtccgggtaccgactaccaatcgtaacgatgaactagcagaattgataacaatgtttaatgaaatgcttgatcgaatgcagcggtatatcgaccagcagtcacaatttgtcagtgatgttagtcatgaactccgaacccctgttgcgattattcaaggacacttagagatgcttcagcgatggggcaaggatgatccaaaagtgctggatgactcaattaaggcaacattaattgaaacgcgccggatgaaaaacttggttcaagaaatgcttgatttgagccgagcagagcaagtagagattaattttcgcaaccagcatacgattgttaatgatgtggttcaccaggtctacaataactttaagatgctatatccagactttactttccgtttggacgacgatctgaaagaaccaatcatggttgatatttatcgcgatcatcttgaacaggtccttgtgattttatgtgacaatgctgtcaaatattccactgatgatcataaagagatccatattattctttcacggggaatgaatactgttgagattggtattcaagactttggtgaagggatctcaccggaaaatgtaaaacgggtctttgatcgcttctatcgagtagataaggctcgtagtcgtaagaaaggcggcaatggattaggtctttcaattgccaaacgactaattgaaggttaccatggttcgattaccctagaaagttcagtcggtgctggatcattgtttagaatcattttaccgattattgaagatccagagacaaaaaaataaatatttaagatgtgagaatagaagcaggatgagaaacttttgctcctatcctcacttttttattacaaaacatttttatttaattgttttctcaatggccgacaaaataagcgatgttttcaactaagggcggtataatgaaaacggatactaaaatatgaggatttttattgaggagttgaataggagtggctgcgaaagagcagaaaaaattaatcacaacgccaacattggtgttaatgattatttcgacaatatatgggtttggtaatgtttcaatagcctatgatcaaatggcatatgcggggatgttttggtacatccttgctggagtttgtttcttcttcccctgttgtttgatgatggctgaatatggttcggcatttaaggacgccaaagggggaatctattcctggttagctggttcgataggggaacagctggcctttatcggaacctttatttggttagcgagttgggttctgtggctagtatcaagtgcttctcgactttggataacattgtcggcactattatttggccatgatactacccaacaatggcatttttggatctttaattctaatcagttaattggtatcttggccattctttttgtcttacttgtaaccttactgagttcccagggaattaatgggattacgaaaatcagctcatttggtggagcgtttatgattggaatgaatgcaatttttattattgcaagtttagtagcgattattgctaacaagggggttactgcccagcctattcatggtattagcagttttattgagtcgcctaatcctgcttttaagacgccaattgcgattatttcattcgttgtttacgcaatctttgcatatggtggaatggaaaatctaggtggagttactgatagtatgaagaatccagcgaagacatttccaagaggcttagttattggttcgctcttaacgattggcagttatgtgctaatgattttaatgactggctttagtgttaattacaatcatgttattgcaaaatcaagcgttaacttaggtaatgttacttatgttgtctttaatcaattaggataccaactaggtgtgtcactagggttaagtcatgctactaatatttttcttggtgttctctttacgcgaatgattgcgttagctggcctgatggggatgttaggagcaatgttcctgttagtttactccccgattaagtcctttatcatgggagctaatcctgagttatggcctaaaaaaattgtgacattgaacaaacacgggatgccagcatatgcaatgtggattcaggcaatttttgtttcgtgtattattttcttagttgcatttggggttcagcagctgctagtttttaccaaatcttgacagatatggttaatgtttcaacctgtgccccgtatatcttccttgttggtgcattcccattctttcaaaagaaggatatcccacatgattttgtagtatttaagaatcatttttggacaaatgtattagttgtctttgttgagataattgtttgcctaggaatcatctttacatgcatccaaccaattattgagcatgattttcaaactgcattctggacggcatttggtccggtcttctttgggattgttgctttgattttctacaatcacgcatcaaagaagattacaaagtagataaaagaggaggctgggagaaaacttttgttttctctcagcctcaactacttttatgaataatagtaagataacgtggaactagcttcgcgtcgccacaaggctcgagtctaagtacgaacgataatcagcccgtgccgtgctaatcaccgttctatccttagcccaccgccttgtcgagaaggttattttccacttactctttattcaattttttaagtcgctggtaaatgataattccaccgatgcaagtaataacaaattcagtaaaaggaactgctgcccagaccccattaattccggcaacttttgccagaataaagattgcggggagaaggataatataaccacgaagaatcgataaagagaatgatgctcgcgctgatccaattgctgttaagaaaaggatgaacaatagatttaacgcgctgaagaatacacttgtaaagtaaatcgggaggccaacactagcataggcgaggagttgaccagaatgagaagtgttaaaaacttcaataattggatgcttaaaggtaattaggataataaagctgattgttgctagaaagagggtaatgataatcccattttttaatgtcatcgatacattcttgtatttgtatttaccaaattcccgactagcaagcggttgaacaccgagcgctactccattagcaattgctagcacaacgatggcaatgttggaaataacgccatatgcggcaacggcatagttattagctagttgcaataaaacatggttaaagaaatagatactaacaccagtacttaattcgtttaatgctgaagcaacccctaaacgtgctgagcgccaaatgtttcttaggtgagggacaacccagtgccattgtaattgtcgtccggcaaacttccgatgaaaacttaaaaccatcaagctaattgctggcgaaaataacactgccaatgctgctccttccaatttaagacccattccaaagataaagaaccagtcgatgagaataacagataatgtttcagttaaggtggcctccatggttaacgtgggattgccatcgttacgaatgaaattaatggcaatgtaattaaccatatagagaggtccgctccatgaaattattcgtaaataaatgattgccatctgacgagtggcatcatctgccccaaggaaattaactactggagttgcaaaaatgtttaataggattgctaggataagcccaaaagtaaaagcaaaaatcatcagttgactaaataatgattttattctctcaggatgcataactttatttaacgaaaagattgtggcgccaccgactcccagcaatagcccggttccattaaaaacgttgaacagggggagcaccaggttaagcgtagttaagcctaaagccccggccgcgattgaaataaaaagggtgtcaataataacatacattgacatcccgagggtggcgacaacattacgaataacataatgccgtacttctttggtaattgacattggtgaatccatattaaaacctccacaaaacttgctcccatcctcccagttggacgcctgtttgagaagcataacttaatttgttgcagaacccggcgattctactttccttatttcatttattgatattttagcaaatattctcattgcttatattataattccattacaatggtcaatttcatgttgaacaatctcagcagcaaaatctgtaagttctaatgtttgcgtttgccagctctgattgcgaaatttaacggtaatttgcttataccgtttagtaggacgcgttccgcttaatgaaaggcatccttctgcagtttgataagggtgacttttagcgacaatttgcggattgaacattacgacattaaagggcccgattcgcgcaataattgcattcttatttacaccaatcatattggcagccattccaacacattcagcttggtgagcattaagcgtatcgctaagatcggttgcaaggggcaaatcagctttagtagttagggttgcttttttagcaagtaattgttggtctttaataattggtttaatcatgtgtcttcctccgaaaaaataaagctgagaaaaaacttttgctttctcccagcttcttaataattattttttatgatgttgctgtttgccagcattacgttgacgattacggtttgcttgatcgcttggcttggcatcgcctttacgtaattggtcaattgcatcagtcggtttagttgaagaactaggggtgttaattactggtgcttctggcattttaattggattcttcttgctctcttcctcaatttggcgacgaatccgcggacggtaagcattgaccatcaaggtttgtaagatggcaaataatccaccaatgaagaagtaaagacctaatccggcagaagaagtgatagaaatgaagaaggtcatgaaaggactcatccaaatagcagccttcatttgcttcttctgggcttcaggaacactgacaagcccaagataactctgagcagcataggcaataaaagataagaccgctaagataatacttggcttaccaagtggaatcccaaagaaagttgcatggtaaaggtctggagaataacggatagcagcatataaggcggcaaaaattggcagctgaattaacaatgggagacagccgattccgccagttaagctaatgttgttatcccggtacagagccatcatttgttgactaacggcagcctgttcttcaggagtcttggctgctttttgcttttctgttagttctttaatcaatggttgaaccttggacatcttttcttgcataatggttgattttttcatttgtgagaacatcaccggtaaaagaattgttcgcacaactaccacaatgacaataattgcccaaccgtagttattgcccatgtggctggctaaccattccatcaagtgctgcattggtttagccatatagtcatagacaaacccgtatggtcgaccgctcttagtagtccgtacacatccgctaagaagcagcaggagggtaaagagccccccagcgatcgttattcgttttcgtttcatattaatgaatcaaactcccttatttctttgtatattaattacgttaatagtacgtattttactctattcaggaattgaattctaccgctaatcgcgaactaatgcgtgatttgaaatgaatgatggtagttttgcaggcttccttcgatgattttaaccttagtaattcgagcataaggagtggggccagctttaattttagagattaattgtttaacaatctcaatgggaccctgcaattcgcaataaacgctcccatcatgcttattcataacgatcccttctatttctgcttgttgtgccaactgatagacgctccagcggaatccaactccttgaacgcgtccagtaatggtaagatgataattaaccataattaaagctcctcgtattctataaataaatctttacggattttgctacattacatcttgtcttctggtcaccgcatgataacctctaattatcattggctttggtcaactggtataggttaatacctcctgtagtttgaactacttattaagtctgccgcccaggcaatcaactaattttcgaactcacatgctgtatcgattagagaatcgactaattcagagtaggattaggtgcagctttgattctctaaccaatgaacactgatacttgcgaggatgtctttagtgattgtaattaggggctatcatgcagtgatcagattaagaccagtaaattttaatgaaaggaggccattccaatgaaactatttgtcggtattgacgttagctcaaaagatcttgtaacctcgatgatttccgaaggaaaccacgaagttgttttccaaggtaacttcgttaatgatttgaaaggcgcaaccgaattaaaaaatgtaattatcaacacggcgaattcaaatcatttagaccaaattattatcggaatggaagctacttccatttatagttttcacccagcgatgttctttcaagaagattcagacttgaaaaagctgaatactcagtctgttgtcatcgatcctaagaaaactaaacgctatcatgatgttttcgctgaagacaaaaacgatcagatcgatgctttttacatcgccgattatttacgtgttggtcactactcagttggatttgtccgtcaggacaattacattgctcttcaacgcttaacacgttcacgttatgaactggttcaaagtctagttcgtgctaagcaacactttattgagaacttatactataagctcaatgaactagtgatttctgatgagctaaacacttcagtcttcggttcgacgatgatgagtcttttgactgaagatatgactaccgatgacctgctcaatatttctctttccgacttaactgcgtatttaactgaacatggacgaggtcgcttcgcgaaccctgaagccctagctaaaacaattcagaaggctgttctctcttcttatcgtttagataaagttgtcgctaattcagtggatacggtcttgtctgtttatgccgaagagattaaagcctttcaaaaaatgattaaggatctcgacaaggcaattgagaagattgttaaagtaattgatgaagaacaaattctccgctcaattcccggcatcggaccggtatacgcagctagaatcctagctgagattggtcaaatcgaacgatttgacaatgaagctaagttagctagatatgctgggctttcctgaaaagaaaagcagtcgggaaattacgctagcgataatacaccacttaagagaactggtaatgcttatctcagatactacttggttgaagctgccaaccgagttaggatccaagatccagttttcggtgaatattaccaacgaaaatataaagaagtgaaacgtactccatccaaacgagctctcgttcttaccgcacgtaaattagtcagggtgattttcttcctactcaaaaatcaccaaatctatcaagaaaagaggtaattggtatagaaagataaaatgattctcgacgcttaagttttaaaacaccttggtatcaaggcttatttaagtgcgcccaaaatctggtcaagacaagctagtcagtgataattacatcctgacttattaccacatgacttaatgaaaacttattattagttaataacaattgtacaacaggaacatggtataatttaattaacaagaaggagcatgcaaaatatatggaacaattaacatcaattcataatcagcacgttaaagattggaagaagctgcaaaccaaaaaagcacggcgtcagactggtacttacctgttagacggctggcacttagttcaagaggcatccaaagctggaatcgagctcttagaagtaatcggaacagctgaacaattagctgcccatccagagcttgaaggaatggctaatgcaacctatgaagttactgaagagatcatgaagcatattacagatacggtaacgcctcaagggattgccgcggttgttgctttaccagattctcatcatttaccagcagggccattgcatggggcatggcttttcctcgaccgggttcaagatccaggaaacgtggggacaatggtgcggacagcagatgccgctgggtttactggagtagtagttggacaacgctcagcagacttatttggtcccaaagttgttcgttcaatgcaaggaagtcaatttcaccttcaaatgtttgagggtgacttaagaaagtggattgatgattttaaatcaatcaatgctccggtgtatggaacgcaactgaatccccaagccaaaaacttccggactgttgatcctggtgatacttttgccttaattatgggcaatgaagggcaggggatgagcgacgatcttctttcacaaacaactgataatctctatattccaatgcgtggtgaagccgaatcgcttaacgtcgctatctctgcaggaattttaatgtttcagcttaatcaaaatctagattaaattaatttattttctcgttaaaatcgtgtatgataattgcaataatatagaaaaggggtattacatgaaatcaaaaaatgaatggcgcaccgataaagagtatgtttcaatcgttgccgatcttttagcccagccagctgtccaaaagctagcgaactatactcagcatcatcactctacccgcctgcaacattctattgcggtttcgtatgatagctacaaaattgctaaaaaatgcatcttgattatcgcagtactgcgcgggcaggtctcttgcatgatctcttttattatgattggcggacgactaagtttaatttaggaacccatgcatttattcatccccgagttgcattacgcaatgctgaaaagctaaccccgttaaataaaaaagaaaaggatattatccttaagcatatgtttggcgcaacgttggcagtgccacgctatccggagagtttaattgtatcgctagttgatgatttcgaagcagagcatgaattctttggcccgctacgtgcaaagatgcgtcgaaagattaagaaacgtcgaatgcaaacaacttggtagaggagaaggagagttaaattatggaacaattagtagcagaaaaggcacttgatgaagactgtaaactttgtccaaaatttacacgtacgtttatgatcttgggaaagaaatggaacggattaatcattgaagtactacttaaaaatggcaacatgcgatttaaggatattgccagtagcattgcaaagtgcagcgatcgagttttatgtgaacgattaaaagaactcgaagacgaacaaattgttattcgtaacacttacgaaggttctagtcgggtagattattctttgactgaacgtggtcaagaattgcgcccagtcatggaagctgttcatgcatggagtgacaagtggatttaaaataacgcttgacgccttacagatgattgtctagaatatgtaattgaattaaaagcgatgatgagagctagtagctagacgatcctgttagagagttgcaaccatgagctgagaattgcaatcagcgatctaaggcgaatttcactttcggagctgatacgtaatggtattccggccaatcaccgttattgattatttgagtgtgtaggatttgttcctacaaactagggtggtaccgcgaagcctcgtccctatattgggatgaggcttttttgaattaaggagtgaaaatatgggactaagagagaaattagccgaacttcgtgaagaaggattgcaagatattaaacaatcagaggatttaaagcgaattaatgaaatccgcgtcaagatgctgggaaagaagggaccgattacttcagttcttcggggcatgcgtgatcttagtgctgaagaacgtcctaaagtagggcaatttgctaacaaggtgcgggatgaattatcagctgcgattgaagaaaagcgtgctgagctagaacaggccgccatgaatgctaagttagcagcccaaacaattgatgttactcttcctggaacaccagtagcacaagggcaaccccatgttattcaacaaatcattgaccaagttgtggacttgtttgtatcaatggggtatgaagtagcagttggggatgaagttgaacaagaagtttataactttgaaaagttaaacttgccaaaggatcacccagctcgtgatatgcaagatacattttatgttacgccatctgttttgatgcggacccaaacgtcaccaatgcaagcacggatgctcgaaaaacatgattttagtcaaggcccactaaagatgatttcaccaggtaaggtttaccggcgtgatactgatgatgcaacccacagtcaccaattccaccaaattgaagggatggttgttggtaaaaatattaccatggctgatttgaagggaactcttgaggccgttgctcaaaaccttttcggtgacaagttaaaggttcgcttgcgaccaagttacttcccatttactgaaccatcagttgaggcagatattacttgtttcaactgccttggcaagggttgtgcaatttgtaaacaaactggttggattgaagttcttggtgccggaatggttcatccaaatgtgcttaagatgtcaggcgttgatccagaagaatacggcggttttgcctttggacttggaccagatcgttttgccatgctgaagtacggtgttgatgatatccgtaacttctaccaaaatgatgtccgcttccttaaccaatttgaccagaaaggataatgtgaaatgaaagtatcatatcaatggcttcaagaataccttgatttagatgttgcccctcaagatttagctgaaaagattgctcgtacctctgtggacattaatgacgtttactcactgagcgacggattaaaaaagattgttgttggggaagtagtaaaatgtgaaaatcaccctgactcagaccatctccatgtttgtcaagttgatgttggcgaagaagaaccgattcaaattgtttgtggtgccccgaacgtccaagaaggtaaaaaggtaatcgttgcccttcacggtgcgcgaattgctgataaccaaaagattaagcgtggcaagatccgcggtgttgagtcaaatggaatgctttgtgctcttcaagaaattggctttagcgacaagattgcgcctaaagattacgaagatggtatctacttcttaccagatgatgctaaaaatggtgatcctgtatttaagtacttaggaatggacgatacgatcatcgatacagacgtaactcctaaccgtggagatatgcttagtatttatggaaatgttaatgatatcgctgccttttatggattaaagccacattttaaagaaattacgattaaagaagaaggcactgaaaagacagcggaccttctccaagcagaaattaatgatactaagattgcaccaacttataaattacgggtaattaaaggtgttaaaattgccgaaagtccactatggcttcaaattcgcctctggaacagtggtattcgtcctgtaaataatgtcgtggatgtgactaactatatccttcttaaatatggtcagccactccacagttatgattatgatcaattatctggtaacaactttggggttcgtcatgctaatgaaggtgaaaagtttgttacattagatggggatgaacaaaccttaaaagcaaatgatattgttgtaactgtcgatgaccaaccagttgctcttgcgggaacaatgggtggagaaggaactgcagtaagtgatgatacgacaactgttgcccttgaagcagccatttttgatccagtaatggtccggaagcaagcacggcgcttagatcttcatagtgaatcttcaatgcggtttgaacgtggaatcaatccagcaacagttgaaacggcattgaatgaagcagctgaaatgattaaggaacttgctgggggaacgattactgctggaattgttactggtagtgaagcgccagcagttgatacgccaatcaaactatcccttgcgaagattaatcatgtcctgggcacttcattaaccatggaacaagttactgatatttttgatcgcttggcatttgcttacactgttgatgatgacgatcaattaacagtgattgctccagcacggcggtgggatattagcctggcagctgatctttatgaagaaattgcacggatttatggttatgataacttaccgtctactttaccaacgatgacgcgtaaccggggaggacttacgccacgtcaacggtttattcgggcaagtcgtcatgatctcgaaggaatgggcttaactcaagcaattagttattccttaacaactgttgagaaggctaagcagttccaaattaagccacttgctgaaccgatgaaactcgacttcccaatgagttctgaccatgtagctacccggatgaatattgttagtggcttgcttaatgatattgcttataacgtggcgcgaaatgttgataacgtagcattatatgaagaaggccgaatattcctgccaatgggggatgaacgtccagtagaacaagaacaccttgcagctgcggttactggccaaatggtagctaatagttggaataagaaggatcaaccggttgatttcttccaattaaaggggatcgttgaacgttaccttaagaatatggggattgctgggaagattacttatgttccaactagtgatcgtccagaaatgcacccaggacgaacagctgatattatggttgatgaccaattagtcggcttcatcggtcaagttcatccacaaactgctaaggaatataagattccagaaacatatgtatttgaattaaatctagaattattactggctgcaccaaagattgaaaatgaatatacacctattagtaagtatccttcaatcactcgcgatattgctctcttggttgatgatgatgttgaaaatgcaacaattgtagaggcaattaagcaaaagggtggtgcttaccttaaggacattcacctatttgatgtttatgctggttctcaccttcctgctggcaagaagtcattagcttacaccttaacttatcaagatgataaaggaacgttaactgaagaccaagtaaacacggcctttgataaggttactgcttacttgcaagataaggttgatgcagaaattcgttaaaaattaaaaggctggattttttcggcctttttttagtgcaaataattattttttacgtatttatattatagggctaatcactaaactaataattagtggttgaagcgctgaaaattttctgctattttattaatagtttgataataaaataatgatatttaatataaagagggataaacgaaataatgaaatcaacaacaaagaaaattcttgcatcgtcgttaggggtagctggcgcaatggcaatgggcacggtaactgcaaaggctgatacgaccgttacggtcaatgctggcgatagtttgaatgggattgctcaaaagtataatgttagtgcggatgatattgcaaccgctaatcacttgcaaaataaagagttgatttttgtgggacaaaagttgacaattccaaccaaagataaaaatgaaacacctgctaataatgctgagaaaaaggatcaagccagcaagaacagtcaaagtctacaagattctgttaacaaggcaatgtcttatttaggaaccccttatgtatggggtggtaataaaccaggtggatttgattgttctgggttggtccaatattgttacggtattccacaacggacgacgtatgaacaacaagctttaggaccacatattcacgataatgttttaaacgcgccatatggggcccttgttttctacggttctgatgatgcgccatatcacgttgccatttcacttggagatggtcggattattcaagcaccaaatgaaaatgaaacagttaaaattactgaccaacaatacttccctggaaattactatgttgtgatgcattaatattccctttcacctcacctttaataatttaaattagtaattatcttgcgcatcacaaaagagtgctatatactatttcagattagaaagttttatgagggagacaaattgatgagtattcaacagaataagcgtccagtagttattggtgttacaggtggttccggtagtggaaagacaacggtaagtaataaaatctatgaccaattgcatgggcaagcgatccagattattaaccaagatacttactataatgatcagtcagatatgacaatggatgaacgtaaagcagtaaattatgatcatccacttgcatttgataccgattttttaattaagcaactaacggatttgcgaagtaataaggctattgagatgccggtatatgactatgcacaatatacacgttcagccaaaaccgttcatgtagaaccaaccgatgttattattttggaaggaatcttaattcttgatgatgagcgtttacgtgatttaatggatattaaggtttacgttgatacagatgatgacattcggattattcgccggattcaacgtgatatggtagagcgtggacggtctcttaattcaattattacgcaatatttagctacggttaagccaatgtaccatcaatttgttgaaccaactaaacgctacgctgacattattgtgccagaaggtggcgaaaatcaagttgcaattgacctattgtcgacaaagatccgtgatattttggtaaaacgtggacatacggaattacaataggtgtttacaagctgaagtagaaatggtaatgttgcactggataaattatgaggagtgtttataatggctgaagaaaaaacttttccaatgacccttgaagggaagaaaaagcttgaagatgaacttgaagaatatcgcttgaagcgtcgaccagaagttattaagcggataaagattgctcgtagttatggtgatttatctgaaaactcagaatatgaatcagcaaaagacgaacaagcaatggttgaaagccgaattgctcaaattgaaaacatgcttcaatatgctgaaattatcgataatgaagatgtcgataaggatgaagtatctatgggtcggacaattactattcaagaattgccagatgaagaaccagaagaataccaaattgtcggtgaatcagaatctgatccatttaacggtaagatttctaatgaatctccaatggcaaaaggattacttggtcacaaagttggcgaagtagttgaagttgaagttcctaatgggacaatcaagctaaagattgtcaaggttgattaattaaaataagaaaagcgaggtcgaggaatgtggtgaattcctcaatctcgcttttcttattggtattatttttctactatgctatagtaagatgtatgaaagcgatatcactgaacgttggagggaagaaaaatgaaattgattattactgatgctgcaagtcaatggtttcgtgacgaaatgggattagaatcaggaaatggaataaagttttacggtaaaacctatggtcaaaccgaagtccatcatggtttttcacaaggattcactcgtgaagatacaccagttgatccaattttagaggttaaaaaggatggtattaactatcacattgattcgctagatgagtggttctttaaggatcttataactactgttgactatgatccgcaagccgacggaccggtttttcattttcaacatgaagatggtgatacacctgacgtagctggatttgttaatgacgctgatgaccattccgataataaggctgacgcctctactggagcatctcagcattaattttttatatagtgaaaaagctctttagcataaactattctaatgatagtatgctaaagagctttattgttaatcaaacattgtccttatttgatgttctttcttaacccaccaaccagttaaaccgagacttataactgtaattataagcccgagaatgagaaacggtggccgataataaaattcaacccgatgctttccgggactcattggaatagccataaacgtattaagcacggtttgtggagtagtagacttaccatctactttaacgtgccaacccttggcagcagggatagtagtcattaatactcgctgatttcgctggagattgactgtaccaacgatccgattactacggtatgaactaatctttaagggagattcttggagagtctttaagcttgccataaatggccgttgctttagttgatagatactaacgttttgcatccaaagtgtagctttctttagttgcaaattgacaaggactttttgccccttttgatcatgagcaacgttgattactaccgtattacgaaaggtgtcatattgggtgaattttttgttattcatcgtaattgtggcattatcctcaacgtttggtccgagcgttaagtagtaagaatcgttggttggcggaataaattctagctgaactgatgctggtttaagcaggttttgctttctaaagatcgtgccagtaatttgcttagcactttgaacattattgaatttgacggaattaaagttttgaacggcaaataatgaatgaagtgttggacgaccggcaagcgtttggaaaatctgtgactgatagtttaacggatccattgttgtccgttgaaggtgaaggatggcggtattagctccaaatgcgatcggaagagcatgtggattctcacggagattgactgccgaagttgatcctactaatgggtaactgtaccaatcaggacggaaacctgataggggtaatgcctgtccggctgacgtgttccgagcattcatagtgtatttgtaaccaagaagcgcatcactcacttgagttccattagtatacgtaacaaaaccatccccatctggctgcccaattgcacccatgaaggctggaattggcggctctaaggtcgaaccaaaatggtcaccagaattaaagtctgcttggaagggatcatcctttgttcgcataaaagttttggcaacgcggtagaaactcggatcatgcttctttagtttttttacacttttatcaagagcaatagtgtagttgccaaattcaggctgtgaaacgtaagagatcttattaagcgccgtgtacccactcatagaaatatcacagacagcaaggagaacaagaagcgcgtcgtataagcgcggtgaatttgttcggggaatacaaaggcaactaacagcgatcagcgaaaagcataagccgatattccgttgattgctattaatatacgataagttaagcgtaccaacataccagtaaattgcgataataagcaacgtcaggataagtgcactgcgcttttttattttgaaatcaggttgaagcactttagctgcaagatagatgcaccagaaagagaaaaggtaggaaaaacgataagggtaccaaactggaaactggccggcatgccataaaagatctaatggttcgtaacagaatgagaaaataaagaaaatagaaatggctgccccaatcaaacgacgacgaaggtcaaagtgattattgaagaagtagagacaagcaccgagcattaatagcattccgatataaatgttaggctgaccacttggcatttgattaaaattaaatgatccggggacaagtttcccaagcattttaggagcaaagtactcaaaacggctgtgaatcttggtttcagtgtagatccctttactttgcattaaggcatagaaagttggcaataaaatgactgctgaaatacccaccgcaagcagcgaactgccgagatagcggagaaaaattactccccgttgtcgccatgaggctaacgctggtgtttgccagaggaaaaatagaaaagtaaagatggcaatcatccagcccatataataattatcaatcagcattacggctagccaagcgatataagttccaacacggttttgataaataagtttgaggagtccccaaataattaacggcaaaagtattaaagcatcttgccaaatcatatttaattggttggcaatcatccagccattcattgagtagactgtactgaatgctaaaattcgccacccctgttgtagatccgttttttgcattagccaagcaaaactcaatcccgctagaccgtatcgaacgagtgtaacgatggttatcccagttgcaaggtgttgagcagggaagaataacaaaattaagtttaatggacttagcaagtaatacgcattagttccaaacatttcgccaccaagtcctttgctaaacgaataaaagaaactgctgggatggtggagaatagtatttcgaaggtaactgaaaaaatcgacatattgttgaccgagatcaacggttaataagctgcttttgccaaagggagtcatttgacggtatgcaaaatagcaagccatcaaaataactggtaataggaaacttgcaatcaaaattttgcgtcgatataaacgatgatgttgatataaaaacacagcaaaattctccttctctcaattaaatagacacatccacattatcatatccttttttaaaatgatattcattactattgttcattaaatttcattaaatcattggaataaattcttcatttcttataaataaagagtattattttcacgttagtagtggtaactatctgttaaagcaggtaattttgttaaaatagattcactacgatgaaggagaattataaaactgtgaaattctttgatcgaataatgaacttgtttggttcacgtgccaaaaagcgtcaaaatgcgcagtcaattattccattccggctgaacatgctattatggattgttggtatcttgttattagcgttaactattcgactgttttatcttcaagttctgcaaggaacatcatttaaagcggaagtaaagcgatcagatacaacaacgcagacgaataatgtacaacgggggatggtttatgattcacaagggaatgttcttgttggtaatcaaactcatcaagccattacctatactaaaggggctaatgtaactactgatcagctctatcagattgctaatcgtttaggaaaatatgtgtctgtttctaataaaaattcgcgcttaactgatcgaaatgaagaggattattaccttgctgataaagagcggcttaagagtgttttgaaacatgtcaagacttcagatgccgattctgaagatactaaatataataaagctctcgaatatttgagcaagcatcctgattcatgggaacttacagatcagcaaaagaataatgcccgaatttatgcggcaatgagtggagcatattccctttcgacaacttatattaaagaaacgggtgttagtgctaaagagcttgcagcagttggagaacacttgaatgaaatgccaggggtaaagattggaacgtcttggactcgtaattacccccaaggtacagatattcaatcgttaacaggaactgtctcaactactggtttaccaagtgatgaagttaactcattgcttgctcaaggatattctcgaaatgatagcgttggacaaagttatctggaaaaacagttccaatcaactttagctggttcgaagtcacaaactgaagttactactaacggaaatgatgtaactaaagaaaagactaagtaccctggtaagaagggtgataaccttgtattaacgattaattcaaaattccaaaagcaagttcaatcgattttgaaaaacaattactcagctgccggaaaccagtattctactggggtatatgcagtagtaatgaatccaaataccggtgcaatttatgcgatggcaggaattgaccgtgacccagcaacaggtaaagaaacccctgatgaaattggtgctatcaaccacccaattacgatgggttcagttgtaaagccggcgatggtcatgggggcattaatggatggtgtaattacgccaacaaataataccttaaccgatatgccaattaagcttgccggaacttcatctaagggatcatggtttaaccatggtggatcagcaaatatggcaattaatgcagcaacggcgctcgaagtttcttccaactcttatatgatgcaactactcatgaaagaagcaggaatgaaatatacaccaaatgcgcaaattacgatgaagccaagtatttttgctaaagcgcgggttacttcaacatgtttggactaggggttaaaactggaatcgacttgcctggtgaaacaagcggttatacaggacctgctgaccaaaagcatatcggttcagcacttgacttgtcatatggtaactatgatggttatactttgattcaacttgcccaatatatgtctactattgctaacggtggtaaccggatgcgcccatacattgttaaagaaatccgtggtacgaaagccaatggtcaacttggtgccgttgaatatacaacaaagccccaagttcaattaaccattcctgcttctaaagctgactttgatgtcgttaaacaagggctttatcaagtggttcatggttctaaccgttatgttactggtaaagcgttggcatctgttaaaccatcagtatctggtaagacagggactgccgaaacctactacaagtcgcactcaacaactacgctaagttttgctggatttgcgccatctgataatccacaagttgtagttgctttggctattccaggagcttcaaattccgatggtggtgccaacctgacaatggcaaaacaaatttttgaagcctactggaagactgttcagagtcccaagggtttcggtgactaattaaactgtcaaggaaatttccttaacaaactttgataaattactagccaaatagaagaataaatgatatagttgtacgagttagggttacgataaataaccacgttaaataaaagaaatagtttggaggtcaaaataatgcgtgtcaacattacacttgaatgtacttcatgccacgaacggacttacttaactagcaagaaccgtcgtcacaacccagatcgtcttgaattaaacaagtactgtccacgggaacaaaaggttacattacatcgggaaactaagtaatgaccatataaaggagctgggagaccggctctttttatttatttttataaaaaaacgcttgcataaattcactcaagcggtgataataaaatctgataccgtttgttacttcactataaaggagcggtcataacataatggcttattcaaagaaagagttacgacaagcatatattgcgcgccttcaacaattagatttaaacacccgtctttacgaagagcgaaagttagcatctttgctatatgatcaacctgaatggacaggggctaaaacaattgctgttactttaagtcaatcttttgaaattgatactgaacctattatccttcatgcgcgtcataagggccaacagattgttgttccacggacgttgccccatcgtcaaatggaatttgttgaattaaatgaggataccgatttcgacgagacgtcttttggtattttagagccacatgatggcaaagtttattctccagatgagattgatttgatggttgttcctggagtagcctttaccgcatctggtaacaggttgggctttggcggcggttattatgatcgttacctaaaaaactataagggccctaaagtttcaatggcattgacaacgcaactggctgaagaaaacgaatgggaaccagaagaattcgatcagcgaatagataaagtgttgtatttaccggggatatagaagatgcggacacagggactaagattggcgcccgtgacgcttaccttaataatttttcaggtattagtttattgctggttagtttatgcaggtggctcaactaatacagtaaccttcctgaatatgggtgctcgtagtacgcccttaatcagggaaggtgaatggtggcgtttagtatcacctgtgttccttcatgttggtttatcacacttagtagtcaatagcgttacgcttttatatattggccgttacattgaagagttttttggtcattggcgaatggtaattatatactttgtcagcgcgttttttggtaatcttaccagcgcggtcttcatgccatcgacagtttcagctggtgctagtactgctatttttggattatttggcgcatttttaatgttgggtgtttgctttcaccataatgttattgttcgcgtcttaagtcgtacttttttgtgttatttattattattaatattgtgatggattttttcctgtcaggagttgacttggtaggacacattggcggcctatttggtggctttttcattgtatttattgttggtgctcccatgttaggaactgttgattacctgaaacggttgttaagtggagctgtattaacggtaagtttggtaattttgactctagaattgaagtgataatttatggcaatcgcctcaagaaactaccgcacactatacgatgttcagcaactattaaaagaattcaacgtgtttgtatatgtgggtaaacgactgtatgatattgagttaatggctattgagctcgataacctctatcaatcaggagttgtagataactcaacttatacaaaagcaaagattgtcttgcgtaaagaacatcgtgaagaacaaacgagaattaaaaggggtaaattgtattaaaccttacccaggaaaggaatcattatggctaagaaattaattggtgttgaccttggtggtactactatcaagtttgcaattttaacggagaacggtgagattcaacaaaagtggtctttgcggactaacattttagatgatggttcacacattgtgccagacatcattaactcaattaatcaccaccttgatttatataaaatgtctcgagaccaatttattggaatcggaatgggaactcccggaacaattgaccgtgaaaagggaaccgttattggtgcctacaacttaaactggaagacaactcaaaatgttaaagaagagattgaacaaggcactgggatgcaatttgctcttgataacgatgctaacgttgctgcacttggtgaacgttggaagggcgctggtaatgaaggtgacgatgttgcatttattactttaggtaccggtgttggtggtggacttatctccaatggtaagcttatccacggtgtcgttggtgctggtggtgaagttggtcacatgattgttaagccagatggatacctttgtacttgtggaaaccatggatgtcttgaacaatacgcatccgctactggaattgttcatatcgctcaagataaggcggaagaatatgaaggtaacagtcgtttgaaggcaatgattgataacggtgacgaaattacagccaagattgtttttgaccttgctaaggaaaatgattatcttgctaatactgttgttgatgaagtttgcttctacctcggtttagcaactgccaacttaagtaacgcattgaaccctgaataccttgttatcggtggtggagtttccgcagctggtgaattccttttgaagcgggtaaagcaaaactttgaaaaatttgccttcccaacagttcggacttcaactcaattgaagttggctgaattaggtaatgatgctggtgttatcggtgctgcttcattagctcgtcagtttgtaaacgcagattaatttgtaaggggaaatgatcgtggtacttggagttagctctggcttgatgattcttaatgcagtcattataatcatcttgttagtatggatttttagctgggcatttcagacttaccgtcgaaagagatatgcaactgtccttagtcaagatgactttaagcaaggaatgcgaaaagcacaggttattgacttgcgacaagaaaatgactttaaacaaggtcacattcttggtgcacgtaacttgccttatccatatcttcgtcaacaatatggcgaattgcggaaggacttgccggtttacttatatgatgaaggaatgacattaagtacccaggccgctgcatttttaggtaagcatgagtataaccacctttatatcttaaaagatggttatcgtgcgtgggacggtaaaactaagaagtccaagtattaaaaaagtatcttgtatgctttttatcaggatggttgaggattctaaacaatcatttgctaacgtttggaatttagcctcttgtaaaatttaaccaataaaagaggctggaagaaaacaaagttttcttccagcctcaactgctttcacgaacaatagcaagataatatgaaactagcttcgcgtcgctacatggcttcttgttttgaatcttaaataaaattaaagttggtgtgctgagcggcccttacggatagcagctcgacggttttgatcaaacttttcttcttcttcttccgctggtttaatgacagttttatggaaagtaagaaccccgctagcaatggcagcaactgttgctaaactaccaactaaaataccttttgctaattgtttcataacataaaacctcctcgaatttataggttacctccattatgcaagaattaatggcgttttaccagtgagaaggacaggttttagcataaaatttataaaaattggagagttaagatgaataaagtaatcgcaattgtcggtccaaccgctgtaggaaaaactgcactatcaataaaactggcacatgaatttgatggggaagtaatttctggtgattcgatgcaagtttatcgccgccttgatattggaacggcaaaagttactcccgaagaaatgggggatgtgccgcaccacctcattgatatctgcaatattgaagagcgtttttctgcagcccgttttaagaaacttgctgaccaaaaaatagacgaaatagctcaacgtaatcatttaccgattattgcaggcggaactggattttatcttcaaaccttaacagataatctagcattgggaagtgaccagtttgatcaacaaacgctcgacattcgtaaccattggaaagaggttgctgaagaaaagggagccgagtacgtttgggagcaattaaacgacttggatccagtagctagtactcggatccccaagtctaatactcgccgggttatccgggctttagaggtaattaagaaaacgggtcaattattttccaaccaaccccagttcaaagcaacaaatgattttctcttaattggcctgactactgaacgccctgttttatatgaccggatcaataagcgagttgatttgatgattcaaaacggcttgttagaagaagcaaaatggttatttgatcaaggaggggaagatctgccggcaggtaaggggattgggtaccatgaattatttccttattttcatggcgagattagtcttgacgaagcgattgaaaaaattaagcaggattctcgccattatgccaaacgacagttaacgtggtttagaaataaggctgatactcactggtttgatattttgcgtcatcccgatgatattaatcaaattaagcagtttataaatgattggttaaaaaaataaagtacggaaggaaagatttttttattaaaataaagctcttaaatagaattgacttatgccctgtctattgttattctaagtcacagtgttaaggagagaagcagatgttagatagattggtatggtcatctattatttctgtggagattgtatgaaagggaatgaaattttatgggtaaacacgtatttacaaaagatgaagttcgccaaatggtaaaggatgaagatattcatttcttacgagttatgtttactgacttattaggaacgattaagagcgttgacttaccagttagtcagttagataaattgatggataacaaaattatgtttgatggttcttcaattgatggatttgttcggattgaagaaagtgacatgtatctttacccagatatgtccacttggcttgcattcccttggggtgctgaacacgggaaggttgcgcgggtaatctgcagtgtttacaagactgatggtactccatttgaaggtgacccccgtaacaatttaaagcgggttcttgaagatatgcggaagatgggcttcaaagactttaacattggacctgagccagagttcttcctcttcaagactgatgaaaagggtaacccaactaccaatcttaacgataaggaaaattactttgacatggaaccagcagatcctggtgaagattgccgtcgtgacatcgtcttagctcttgaaaagatgggctttgatgttgaagctgctcaccatgaagttgctcctggtcagcatgaagttgacttcaagtactcagatgctttagaagccgctgataacatccaaacatttaagttcgttgttaaaacaattgctaagaagtatggtttccatgccacctttatgcctaagccgctttctggtattaatggttcaggaatgcacctcaacatgtcattgtttagtcaagatggcactaacgccttctttgatgaaaatgataaagataagctttccgcaactgcttaccatttcttgggcggtttgatgaagcatgcacgaagctacactgcaatttgcaacccaatcgtcaactcttataagcgattggttccaggttatgaagcaccggtttatgttgcttggtcaacttctaatcggtcaccacttgtgcgaattccgagtgatcgtggaatgggaacacgacttgagttacggtcagcagatccatcagctaacccatatcttgcaatcgctgctgttcttgaagctggtttagatggtttacgcaacaacttaccaccaattcataacgttgatgaaaacatctatacgatgacgaaagcagaacgagctgaaaaagatattcatgatttaccagatactttacacaacgcattaaagtctttggctaacgatgaggttatcaagagttcaatgggtgaacacctctataacagctttatggaagccaagactcgtgaatatgcttcatatcgtcaacacgtttctgactgggaacggcaacactatatggaacaatactaattaatgacaataagttaataagcaatgaaaaaacacttatgcaggattacttgctaagtgtttttcatgcgaaatcaactagttaattgacaaatatgttgtttcatatacaattatatttgttgcaataaaagcgtgttattataatgtggatagtacgtttttaaggactgctagttaaactagcaaccaattttaaatcggaattatatttcgattagttactaaaggagagtcttagataatggatcaaaaggtcagagttcgatatgcacctagcccaacaggtttcttacatatcggaaatgctcaatcagcattatttaattatttatttgcacgtcacttcgatggaacgatggtattacggattgaagataccgataccaagcggaacgttgaagatggtgaagctagccaacgtgaaaatcttcactggttaggaattgactgggatgaaggtccaaataagccaaatccaaagtatgccccttaccgtcaaagtgaacggaataaagaaggtatttaccacaaatacattcaagaattattagacaagggcattgcatacaaggattactcaacagaggaagaattagctgaaatgcgtgaacggcaaaaggctaacaatgaacctcctcattatgatggtcgttggtatggcaagagtgaagaagaacaaaaggctgctgaagcaaagggattgaagccaactattcgtttccacttccctaaagaccatgattacgaatgggacgatattgcacgtggtcatgtttcatttaactctgacaaccttggtggtgatttcatcattgaaaagagtgatggaatgccaacatataactttgccgtagtagttgatgaccacaccatggacattacccatgttttgcgtggcgctgatcacatttcaaatacgccaaagcaaattgctatttatgaagcattaggctgggatcacccaactttctgccacattccattgatctttaatccaaagactcgtaagaagttaagtaagcgtgataaagatacccttcaattcattagtgaatacaagaagcacggttaccttcacgaagcaatctttaactttattgcattcctaggttggtctccagttggcgaacgtgaaatctactctaaagaagagttgattaaggtgtacgatccaaaacggatgtcaaaggcaccagcatacttcgatcaaaagaaacttgattggatgaatgctcaatacattaagagtatgtcgatcgataaattaactgatcggacaatggaattaattaaggaaggcgaaactgaagaagctaagcgccttcaaagtattccagaagatcaattgactgaattgcttaagaagacaattaaagttcaccaacgggatattaataagcttcttgaagttattcaatatgcatggtcatactacacggttcttgaccaatcattcaactatgatttgcttaaggacaacgaagacttcgctaatgaagatgttttagctgttcttaagggcttaaaggctaaacttgaaaacggtggcgatgaccttgattacagtcaagctattaaggaagtgggtaaggacactggtattaagggtcgtggtttatacttcccattaaaccttgcctttactggttcaacttctgcaccacaaatctatgaaattatggatatttattcacgtgatacagatattgaattgcttgaccggatgatcaaagcatttgaaaactaattttataaagttaagcataggacaacagctaatcgatgttgttctatgctttttattttaaactgtcatataattaaaatatgtagttagtaaaaaggggatcttaagtaaaatagttgaaatgagtgaacatatgcggaagatcttaaatgatgttccaacgttaaaagtatttgatttttcccaatacgtttcaaaaatttcaggaattattaagtttacaattggtgaacctgattttgacacaccagaatatgttaaaagggccggaattgagagcattgaaaacaatcgaactcactatgctccccaacgtggaacagtgggattgcgtcaagcgattgccgatacgttggctaataaatatggccttcagtacgatcctgcaacagagattcttgttacaaaaggagtaacagaagggatttctgttgcaattactgcaattactaatccgggagatataattttagttcctaaatttcaagaataagttagccactggactcaaataaataatactgaccaattgattattggttgatggagctgtgatatctcttggtagaaggccttacgatagatatccattgacgaatgtccattaaacatagctcgtggatagtgattcatccaatcattagtcgctatgatctgagcactactatagttatttatagcttcacctttggtaatctccttgcggagaaaccggttattgatctcattggatccacgttcccaaggggaatacggatcagcatagaaaacatgatcgtgaacttgtgttaactcactaaattctgaaccgttgtcagaggttattgtcttaaagatgcgatagtaagcatctgtgcccattttctggcgtaaatttataaagaactgatttactgcatgcgcagttttaccagcaattttactcgtgatattaactcgtgaaaggcgatcagtcattactagtacaacactgtcattaccgtttttctgtccctgaactgtatctagttcccaatggccaatttcggaccgttggtccgcagtttgaggtcgttgagcaatattaggacctaagcaccttttagcttgcggatgagttcgatgatgcttacgtttaggcttttcaaagaggtctaaattggacgtacgaagcacaccctcattaatccattgatataaagttacaaccgactttgggatcagggtgccatcattcattaaatctcgagccttataaataaccgcttgtggggagtaatggtggtcgtcaaactcaccaagcattagctgatcagctaatcgtaaaaattgctttgaagaataatataagcgacgacgaccagaatggcggtgatgttcaagatatgtggcctgaccagcttcataactatagatgtagtaagaatattcgtaaatcttaccattagatttttgacgacgaagttggcggaccgtaccacggttgagctcgttattaattgtttgatgattaactcctaattggcgaccaattgcgcgattggaaagtccttgcgactttaaagtcgcaatcatcacacgttcttctttagtaagatgagcattctttttatgagtagtcaataaactagtagacatggtatcatttaagtgcgtcatttgacggacatcctttcatataggtttggttcacttaatatgatacctgatgtcacgccgaatggcgttttttatttaccaccaactgggtggctaacttcattctataatccaccatataattttagttccaacgcctactttctcaatctacacgcctgatgtaatgattgctggagggacgccagtagaagtagatacatccaagactgggtttaaactaacgcctgctcttcttaaacagtatctagataaatatgatgatcgagtaaaaggaggtattttcgttaacccttctaacccgactggaattgcctatactcaagcagaaatgaattagcagccttaattaagggtaagccaatctttgcaatctgtgatgaaatttatagtgaattaaactatgacggtgaatactcaagcatggctaagatcattccagaccagacaattttggctaatgatttttcgaagtcctatgcaatgatcgggtggcggattggatacctttgcgcaccagctaaagtaaccgatctgctgttcaaggttcatgcatttgctgtgacggatatcgcaacatttgtccaggatgctgcagaagccgctttaaaggctggggacgaggcaacaaaggaaatggacgcctaatatattaaacggcgtgactatatgtataagcggcttacagagatgggctttgaatgtagtcaaccaatgggcgcattttatatttttgccaagattccaccattccttgatcaggatgacaataagctaatttatcaacttgctaatgaggccaaagttgccgtaacggctggatcaaactttggtaaaggtggggaaggatatcttcgctttagttatgctacaagtattgagcagattaaaaagggaatggatcgtcttgcggaattttgtgaaaaagaacaaaataatgcttaaaagaaaagagacagcggtgttaacacatctctgtctctttaatatataagtgaattgcttcaaaagagttattcgctcagtttcttggcgtcagcatcaatctttgcaaaaccagaaccatctggcttcttgctgccacgcttttccatagctttacgagccatttccttacgttcttgcttactaagtgccataataacttcgcctctttttctgaaacgcttcaacaataacagttattaacaaaagtaaaataactgttactaatattatagttcagtctataaaaaatgcaattatgaacatgatcgcttaaataaatggggggcatggagagggcaaactgaaattgttttttctgattttcttgataaaataaaaataaaaaataaaaataatccagatatcctaattaattacaagtattaaaaaaagaaaagagttgctacatatgaatttagacacagcaatatttgcaggcgggtgcttttggtgcatggttgaataaatatatcgagaatggcgctatattagtaataacacgttgttaaacaccttattttaattccatgggaaacttatgggaaaattttatttatctaaagaagagatattcttgtgaataacaataatttataaaagaaaaagcgccaacaaaagtcagcgctaagattactacttgagtaaccatttaattagatgtttaatgtgcttactaggcacaatgagaatcagtacacaccaatgcaagggagtcacctccaaacttgcgcttagtaaagattgattaagtcttcggtgcgcttaaccattgtatcacaatttatttatgttataatatatacatgagaattagtacaccggtgtgcaaaatggtttcagttgattacttaaaccgaaccggttggggcgcttaataggcgctcttttttatttacatttaaaattttaaaaatatgtgaggtaattaatgatgaaaagtaaagtgttaaaagaaaatggtgaaaaagttaatgcaaaacattatcaatataaaatttttttgagtaataaaagtgaacctattgaatataattcaactgaagcagtatattcatatgaagaagtttttgaaaaaatttgtgaaaaatatgcaattaagctttctgaaggaaacattgaaaaaattgaaatgtcattagttgattaatatgtgttgagatttaataatacaaaatttaatgaaaataagcagcaagctttcaatttaaattggaagatacttgttgcttatttttattcagatagggcacaagaaagcaataaatgatatgacaaaaaatcttatgaagtaacaaaagaattaagtagttagcataacctatttactttagaattgcatagagatatagctataataaagtttgttttgataaacgagagtgtgatatagtgagcttgataagttctaaggattatgaacatatcctaagaataaatgactttaattaactacttaactaaaagtagaaaggaaaacttgatcggcgcacttttttattgtttaagtggaattaaatttttattaggtgagaataagatgaatagtaataataaagcaataacctcagtttcggagtttataactgaaatagaacgtcattattcagacggtaaagaatatttctttagaggagaatcgaaagattatggaacaattattccaaatttatatcgtgaattaaataagcttatcgatgattcaactaactactataagcgcttatctattgaacttggaatacaaaatacagataatatctcagttattgatcaaatggcgactcttcaacattatggcgcaaaaagtagacttttagatattacaagcaatgcattaattgctttattttttgcagtagaaaataccgatgaaaaagaagacggcattgtacatgtatttaatggcaaagttttttttgattcaggacatacaattgctaccaaaacagcagctaattttatggatatttctttaataaataatttttataaatattgccacaccttcttaaacagtcgtaaatttcctaaaaacgtaagagaagctattatacaatgctcaacctatggtaacggtttggaatatgagttaaataatgtagaaccttatcccattcataatagtgcaaatgttatagctgagttaaggcatatgacaacttctgagatgatgaaagaaatgccgagttttgacttgattgattttatggaaaaattgaatcaaatcgcaaaaactagagaaaggttaaataaaccattagcaatattttttgatatgcatttacctcagatttatttaagtacgtttagtaatgacagaataaaacgtcaacaaggagcatttataactccatcaatactaagtggtcaaaaaagagataactcaaaaaaacttcaaaagtatatttattcgagcttctataaagcagaaaacaatttaataaaagaatatgtggagttaaagaaaagactagttaacaaaccactagttcataacaagcttcccaaaatagtgttaaaaaataaaagaatgaaattagacacattagtaaagtctaaaaaggagttttctcatcaaaaagagaaaagattaataaagttaaaacaaataatgcataaatttgataattatagattatctggtagtgatttaaaacttaaagaagactttaaatataattgttttcagttgatgtttgacgtgaattatgctggttatcgccagtccataacgtactctgtaaaaaagttgaaactgggttcgataataatagatgggagtagtaaatttcaaataaaaaggacattaaatagtcttggaattaatgaagggacagtatatccagatcttaagcatatttcagattcaataattgaaaatcaacattattaagataatgaaccaattttaattattgaatgcatagccggtttttcatgtggaaaatttactgtatttatatcaaaataagattacataatatacagttttactaataaatggtagtattatgaactcataagaaatgaattaagcagcaagccctctacacggaaggaaacttgctgcttattttttattcaaatggggcacgtttagttggcatctcttttccagtaaagggatcatacatagcccatttatcccaataatctactaattcttggcggaatactttctgagcttctgaaatagaaatatggtcaatccgggagattcgttttacataaggtttccattcttctggaatttgaatactgtctaatgaagcttcttcaagaatatagcctttgaaatcttctttatatcctaaatgatcaaacaagagtttacccattacatttgcatcgtgaataatcttttgggccgtttcttctgtatagacgagcgaatattcaaggggggcttcgttaataagatccgcagatttacagaaatatttattagtatgagggttcttcattcggtataaaatagtcataaaaatagctccttttaaacgtatgttcgatattaatatagcatagttagtcatttttatcaaacatacgttctgagcaatggattaagaaaatgtatattaaagcttacttaacttatcagccaaagactcttccatttctttagtaacgtgtaaataaatttcttctgtaattttactattttcatgtcctacgtgattttttataacgtataagggaactccaagttctgctaattttgaaacatgagtatggcgaaaaaaatgtgtagtaacacttttatcaatttttgctcctgcttctaatcgatggagaaaacgatctaaatgtgatgcatcaaatggacgattacttcgtgaatctttattaataaaaatcaagtcatttggatctttattgaggctaagttctttataaatattgacagccttttgtggtaatagtacttctcgattactagcaattgtttttgcaccgtcagttttcttgactgaaactttaactgtagggttacttacagtccctaatagttctcgttggtgtgaaagggagccatcaataattgctttatacttaccttcttctttaattatgtcttttacataaagtccggccgcctctccacaacgcataccagtcaaataaagccactctaggaaaagcttgatatcattacgatcttttttctcacaagcatgaaggattgcgtgatactcatcgtcagtcaaatatttattttcaatacgatcacgttttcttttaatttcgcttcgccatgttatttcaacatctttgaccggattctttttaagatatccatatttaacgccaaatttatatgtcattgataagtatttcttgtaattttggattgaagcattggttaaaggcttatctggatcataaagcttttgatctaaatagcgattaagtatttctgtagttattttattagcaagggtatcgttacctaagtcattacaaatccgtttaagccctcgaaaggcattatagtaagtgttaaccgcaactctttgtttatagatagttaaaaatttgtcagcaaggtttcgaagtgaaatatctttatctgtgaagtattccttttgcttagctttttcaattttttttgccagctcgatggctgctgctcttttagtttgattattatttttaagataactaacagagacttttttatactttcctgttaatggacttttatagttttcgccaaaacgatatctaactttgccacgtacggtatatttttcaacccacatttttatctcctttagtttatattgtgcaaaacatacgttcttttagagtgctaaataaaaacgccagtagaagaaatagctaattctctatattttttgcgcatcgcaaataatgtaaaattagtagctctatcaacgctttctgtcattgaaataggaattcgaaaggcttcaattaattgctgcttagtctcaaaagtgatgtcgtgtgtacggcaataatctaaaagcaacataattgcaattagatcaccatcgccttcggctttttcattaacactgcaataattacaactaagactaacttcatcaccagataaaatgtgtccaatttcatgagctagtgttagtggtcgttcgcaagctggaaaccagttaggattgtaccaaacgcatcgcaattcaatttgcgattgtggtacccagtcacttggccattggctttcagtaaggacagtaatgttatgttccttagctacaccttttaaccactcaataagatcttccatcttgttcatcaacgtcaccttttttctcatcaattttatttatattcagttagtctatgtattgtaattattatttttgcttattttgtttgttattcattgccttttgtgattctaaaaaggacttaattgaattgcgcataaatgctttttgctcatcgctaatttgaagtccttcgtaagaacgtaatccattaaaataatgatcaatatcttcggaagtaatatcaccatttccgttattagtattttgtacttcttctgggtgccggcgctccttcttatcacttacccccattaaccatccttcatccacatttaatactttagctagctcatataatttatcttgcttagcttcatattttcctttgaggtagtcggatattagttgacggtttataccagttcttctgccaagttcggattgggaaatttttgcatcatctaatgctatttttaacctatgctgaaagctgtcaactttcctaatcataattgtttcaactccttaaagctaattttaacattaaaatacaaaatataacatattgagtaaagaaaaattgacagaaaatgattgtaattgcaacactgtcatgttaaacttgcttttgtaaagctaacatgacaaaaagaggatgatttatttgatttttaattatgataaactgaaggatcgaatgcaacaactgagatataatcaggtatctcttgcaaaagctacaaacattgagcgagtaacattaaatcgaaaaattaataataggattatgtttaagcaagacgagattctttcaattgcgaatgcattagatatagggtcagacgagataggtgtatatttttttacccttattgtcaagaaaagatgacaggatatttaagaataataaggaatttgttaattcgggagaggaggtaattctgatgatggcaaacggttggaagagtagggaacaaattatgaaagattatggctatagtgaaggaacttttggtgatcgaatgcgtgaatgtcttgaatctccatacagcagcgccgttgttagcgacacctctaagtatgcaattattattgaaccgctttatcagaagttccttatgtggcgatcagaaaaaatccgtaatgagaagtcggaaaaatcgggtcgtttaactagaggtaagtatgattaaaaatataaaggattaatcataaattggcagaacttggaaaatttatgagggtactcaaaaattgaacaaaggtgataaatgggtgtggaagaatattctaaacaactttcgttacctagatgaccttaaacggatagaggtaaaaggaactacttggaaaccccatagtacttctccttgaatgtttaaggcaataacctttgcacaatggttgaaagagtatttaagcgagttttcaatgaatggaaatggataacagtaaaagaaagtggggtaggtactatgcctaaaattataaagattaaacataaagcggttaaaaatagccaaattcaaattcctgactatgtatttgatgagggactaactctagacgcaattggactgtatatttatttactaagtcgcaaacaaaaagaggttagccttgaggatattaataataaatcgagggattcacaagagcataatttagaaatactgagtgaattggaacaacatcatttaattgctaaaaaacttaatagcaaggctaactttatttggaaattacttccggtaaagcaggtgtagttttatgccgaaaattaagcatcgaagacgtcaagggtattcaactgtaagcaatactccatatgatgaccgccgtctgcagctcgaatcaatgggtgtttttcaattgctatggcacttacctgacgattggtcatttaatgagattgatattgttcaacgttcagcttctggtagaacgaagctccggaaagcgttagacgaacttgaaagatttggttacttaaaacgaagtcgattgcgtaacgaaaaggggcaattaacagctggtgattgggtattagatgatttagggacacttggtgataattcagttttggcaaaaaagaagagaatggaaagaaaaaagccaaggaagcatcaagtaaaattttactcatgggttcaaaagcctatgttctgttttgtgacattggcttatttctcgccaaaaacctatgtcacgttttcaaacataggtgtattttatcgaaaacctatgtcacgttttccaatgttggataacgtcctactactaattactcatagcactaattactcagtaagtagtaagtatgctgctagcaaagcagcacaaactgatgaacagattcttgcaaagaatcgttcagaacattcactagacgatccaaaaggtatttcacaagcatataatctctggaatgatatctggggtaaaccttcagcgttcgtcgaaaagcaaattagccagtgggttaatgaatttggaattgacgttgtcgcccatgcctttaactatgccaaatggaaagtggagcaagcatcagcagcaggctcctacctagcaaaggtatttgacaattatcggcaaaacaacgttcaaacagcttctcaagcagcagaagctgatgcaatgaatttacatcgttcaaagctctcgcaaagagctaagcaaagcgattctactactacgcctagcaaaggcaaatcatctcgcaaagatgatcttaaaaatttaataaaaagcgaaccagaagctatctgttaccgagcagcatgtttagcaaaaatcaatttaagcggagcagaccagcaggctcttaatgagtttgtcaggcatttaggccctaagctagtcctaaatgcgattgaggttgctaaacaagaaacaaggtaccagtacccttcgtggggctttctcagatcgattttaagacgatatgaggctcagggaattaagacggttgaagacgttaagagcggtgatcgaaatatgcctagcaaaggtaattcaaagcaatataagcgtcataagccgattaaagagccaatgccagaatggagtcgaaaaccgcaagaagagctttacaaaaaggcagacccggaagcaatacgtaagcttaaagaacggattgctaatcgcaataagcggcgaaaggaagtttctggttaagcaagttggggaggattaacgatatggggacgaagaaacaagcgcaaattattactcgactagctcacttaatcacaaaaagaagtgaacggctaagtaatcaagaaagtctgtcagctagcgtcagcattaagcttacacaagaaattaagacttactgttttttgattcgcgtatttcaggaaaattaattcgagggagattttgaaaatgaatggggataaattgattgacaatattttgacgatattcatgcttttagggatttgctgcattctagatgcaatattctttgccatcatcctctttgcgcctttaagaaggtaagcgacgatgaaacatttgaattgggctgcaattttattgattggctgggcgttttactttcagatttttttgattgtggcgattaaacggctaattgaatttctgagcgttaacacagttttatcggttttgggagcattgctgctcagcactattttaggtggcaccctgatgttattgattattcaaaacgaaagtggggaatagagaaaatacaatgaaaactgtgcttatttggacttcataggaggtgagtttgcagtgaaagtaacagtgggtcatcacttacttgaagcgtacccagttgaaaattatgtttatgaagtatcatattgcggtagaaaagagttttaccaagatgctttggacgctgctcattcaacgctttacacaaaagatagttcatataatgcaacaattactaaaattccagttaggcctattagtgaaaagagaattgagaagagactgctacatcaaaagtggagtcttgatgactgggatccatcagcggttaaagaattcaaacaatcaaaactttatctttttagactgtatcttagaaaaataggtcttattccattattgattatgttatatgttgcaatttagattgtcttagcaatttttaagtaaagattggtcgaggaggtaacaaaatggggaaagattattcattaagctcagaattatgtcttagtaattggactgcagaaactcttgatagttctgtaaagcactggatgaaaaacagaaatcagctgtcaagtgcaagcgcttatgtaattagcgatgaagattgtaattttctgaagattgattttgaagatccagtaaaacaagctgatgttctaaaaattaatcggggctctcttggtttggcaacagtatttaagactattcaatctgctaatgctgtcataagttttctagaggctgtaggtgttaaaaaaataaaaaatttgcaagtacgaaagctgcaaggtttattgtattaggattgcgaaatgagggtgagtatatggaatttaaagaacaagaacggaactcgcttgaattagttagccaaattttaaaagatagtccattcgatggctgggtaatcgtagcacaatctccggaggaacaagatatgatttcaatcacttctggtggtaggggaatttcacatggtgcgttagtgaatggactttatgattcagcaaaccgttttgcacaattaaattttaagagtgaaattactaagactgattttattttgacaatggcagaagcgatgggagtctcgacggctaatttaaaatcagctattgagaaaaaaccacaaaatatttagggggcttgttacaaatgcaagaaagtaatgcttcacaagcggggtatcaaattgaaaactcgaataatggttttacccaaataacaaatactgaaagtcaggctgtttttgttcctagtgaactgtcagagagctataaagctttatctcctgaggaacggcaatggtggcttggaattgaacgaaaggttgataataaccggcgtgactatattatccgctttggcacaattctaaaggaaattaaagacaaaactagccgccaaggaaaccgtgataaagacaagattacatttgagcggtggattaaagctcatcatgtttcaaaggggaatgcctataacgctattaacattgcgcaagcatattatcgaattaaggcacagaatgatccggatgaagagctaatgcttgataattatctaagccttcctaagatggcccaattagcaatcgcaaccggaaaggctgatccggaacaggaaaaatatttattacatgcaactgtagaagctcgtaattcgcgaatttggcaggaaatggctaagtcgattagcaagaaaaatgagctcgctaaaagtcaatcaaacaaaattcaaaaacttaattctgaaaatcagcgtttagctaatcgtttagcagacgttgaaaactctcgggctgaaattatgaatgagctgaatgatttacgagaaggaaaaagacacttagaaatgcaactggaggagcaaaaaaacaaggagccggaattagttgaggttgcacctgatgattatgacgaattaaaggctgataaagaagaagctgaaagcttgcttgctgatcgggaagaaaaactcaaaaaagttaaagcggagttaaaagctgctcaagaatcaggacaacaggttgatgatcttgctaaacaagttaatgacttaattcaaaaaaataatgctttgcgaacacagattaagcaacaggaatcagtagaaagtaaacatgacaaagcttttaagcgtgtttcatcattttcatctgaaatgttagcaaatttagtaaaagattttgacctgatgcaagttttacctgaaaccaaattcttaagtcagaaggatttagcccagactgatttagtaaaactagcagaaatgtttgaaagtaagggatcagaaattcgtgaaaaactattagccactcataatagtaaacaagtaattgacggggactttaaggaggcttgagggggagaatgaagaaatgatgtacgtgaaaggaagatttgttaacgcaaatgggcttgaaagaagaccctggtattttgcggtttcctcgaataaattacgggattttaagttggccatgcaactttacaagaaaaaatcagtactagtaatggttagtgatcgacggaaatatgtaaggatagctcaagtggagcctaaaatcatcaaaacacttcctaatagtggaaaatgtgtaggtaatttaattgctatcttaaaagcaagtaacgggcgaccaatcgaattatttaagttagtgcagagttttccagacgacttaaaaaatattacggttgctgaaattgcagctcttcatttgccaagtctaaatcgtaaacttgaccctaatgttcaccaccttcctaaatgaggctagaagcaatgatttatcgtagacgattaacccgagcagaactacgccaacgagctaatcataagatgattagtggatcttggaatgacgaggaagaaaatgagcccgaaacacaactaaaaaacataaaaaatactggtcgatggataacacctattttaggaacctttgtgttgaccttatttatttttttgcttttttggaatttgtatcacttttttcagtgactaaggggacaaaatttatgagttataaggaaaaatcaaatcatgattaggaaaaaattgccaccaaaacggtcgatatatcgacgggagttaaggaaaaaagcattacctaaaaatattctgtataccatgttgttggcatttttaatcttgattctattggtattcttactgctatttgcagcaatgattaagattattttgacttgaacggaggaaattgaagttatgaaagaaattaaattgcggaaatataatcaaggcctaaatcaattgctttattcaactaggttagaaggagaaaacgaactgcgatttaacttttctccttttgatgagggaagttcatggattgcaaatggctcactttccaaaattatgatgtacacgggagttaatgatcaaaacgggaagaaaatttatgaaggcgatattgttcaaataattcatgatcaaaaacctgttataaagcaaactgtcagatttaggtggattgtagaatgaagttagccacccagttggtggtaaataaaaaacgccattcggcgtgacattaggtatcatattaagtgaaccaaacctatatgaaaggatgtccgtcaaatgacgcacttaaatgataccatgtctactagtttattgactactcataaaaagaatgctcatcttactaaagaagaacgtgtgatgattgcgactttaaagtcgcaaggactttccaatcgcgcaattggtcgccaattaggagttaatcatcaaacaattaataacgagctcaaccgtggtacggtccgccaacttcgtcgtcaaaaatctaatggtaagatttacgaatattcttactacatctatagttatgaagctggtcaggccacatatcttgaacatcaccgccattctggtcgtcgtcgcttatattattcttcaaagcaatttttacgattagctgatcagctaatgcttggtgagtttgacgaccaccattactccccacaagcggtcatttataaggctcgagatttaatgaatgatggcaccctgatcccaaagtcggttgtaactttatatcaatggattaatgagggtgtgcttcgtacgtccaatttagatctctttgaaaaacctaaacgtaagcatcatcgaactcatccgcaagctaaaaggtgcttagggcctaatattgctcaacgacctcaaactgcggaccaacggtccgaaattggccattgggaactagatacagttcagggacagaaaaacggtaatgacagtgttgtactagtaatgactgatcgcctttcacgagttaatatcacgagtaaaattgctggtaaaactgcgcatgcagtaaatcagttctttataaatttacgccagaaaatgggcacagatgcttactatcgcatctttaagacaataacctctgacaacggttcagaatttagtgagttaacacaagttcacgatcatgttttctatgctgatccgtattccccttgggaacgtggatccaatgagatcaataaccggtttctccgcaaggagattaccaaaggtgaagctataaataactatagtagtgctcagatcatagcgactaatgattggatgaatcactatccacgagctatgtttaatggacattcgtcaatggatatctatcgtaaggccttctaccaagagatatcacagctccatcaaccaataatcaattggtcagtattatttatttgagtccagtggctaacttattcttgaaatttaggaactgtcagatttaatcacggcaaatttattccagtatgcgattacaggtcgacggaattaagaatcgttggtaatgtttttagcttaaaaaatgatggtgaaccataggtaaagaaggtgaacaaaaattgaaatacaaattaaaatttcaatttgatgattataaaggctacgctgtaatcactttacccaaagaagaaagccttgaggaattaaagcatgatttagctttaggcaaatatcttttgaatgcggaagaaagcactttagagttttcaacatttcaaaaatataacgaaaagcgataccacttagtcctttataaaaataaagatacacgcttaacaattgaaggttcctttaatagtactcatgacttgggaatgaatttagttaaagctgaattattgcaattgaaagaacaaaaacctgtgatgcaggctcaacaacttagctttctgtaagtgatttgatgctaagtaatagattaagtggggtaaatttttaatgaatagatatgatccagaattattgcatcgtcgtagagtgattacttttagtgtattaacggtagccgtcatattgcttataacgggctttctctacggaattggagtgcttcatcgaagtagtacaaaaacgcaacaagcagctcttaaaagcaatgagccggtggtagtaatgtactactctaaaacgtgtccagattgtaaaaaagtagcgattgatgttcataaaaatgcttgggaagtaacagcaactcaagccacgattggtaagttgatgccatcaccatatcgccataagaatttatatttacaatggcaaaataatgaagataaaaggctatttaagcaaaacaatgttaattcagtaccaacatttatggtttatcgcaatggaaaaccacaaccgattgctaatgcgaatggaattgatatttatcaatactcaggtactaataagcaggtaattgctaacatctaccattacttacaaataaataaaccgacagaaaaacagcaggggggtaaccaatgaataaaagaaaatggcgaaaaaagatccaattttggattgataagtatggaaaaagatttgctaaatttaagacttggtatgatgaccacgcgatgcaacgtaaattaattattagtggcacgctctttttaacaatgatagggctgcttgttggcacacgagttgcaccaagcaaatcgcgatttgccgatactccattaaatacagcagagagttttggtaatgatagtaatgccacaatagcactaacttctcgtaaatataatgctaagcaacaattcctggttgcgcgctttaaggtggcaccacaatctggtcaatatatcgatcctaaaaatattaaatttaaggttcgtacattaacaaaacaagatgcttcttatcaagttattccgcttgttaataataactttgtagtagttattgataacttaccgaaaggatacaaagcaattcagctagaagctattaataaacaaggagacagttcgcaaattacttatgatgcttcttctagtattgatccagaatctttaagttctagtgatagcgaactttcatcatcaagcagtgggaatggccagactggagcaggcaaaaacagttacaaatttgtcattaatgaagataaaaaatttgttgataatcgtttaactagacaaacccaaaaagaatatgcggttcaatcattacaagaatcaatcaagttaatgaacagagaaattcgaaaagaaaaaggagctttgactacctatcagaaacaattagctgcagatcaagcagcaatttctcaagcaaagaataatcaacaatatcaagtcgataaagatagtaattctgataatattcagcaagctcaagcagatattgcgactcaaaagcagaatattaagaacgtaaataaggtaattaaacaaagtaaattacaaattaagctttatcaaaaacaaattgatgatactcaatcaggtaagtataagttcccagcaaaggttgcaactaagaagatggaataaggaaaaaagaattaaataaattcaaaaagccagtcgatcaaaggctggctttagttataactaataaacatttcatttttagtttaagaaggttgaaggaatgaaagaatgttaatttttttatggataagcggatttaataggaaactggtaatatatctttttatttttttgagcactttaatatttatatataacctaatggaattattctttataagttttcgcaaaaataaatatttagaatggagtgaaatacaaaaactaactaatttgaagatagttttagtccttaatatgttatttatcattggcctatgaatctggtaagaggaaaggtggtatggatcagttgccgttacgaatgagttctgttagaaaatataaaatttaagtcagactggaataattataatacactatcttttgtcttgatgtaggtttggaaaaaggtattgatacaatgcaaaactagaaattatagcagatattagattgaaatagtcactacttagaactaaaagcaatgaagttataattgaaatgattgaaagaattttggcgatagtaattgctactttaaagcattgtccttcattagaaaatattgaacagagaagtaaataaataatacatgaaaaaatgctcgatcctaaaagtaatacgatggttactacaatccaatatataaaggtcattttattatgggaaaaaccaactactatagaagaaaaagcagaatgctttagaggatgagagaagatttgcataaaaagtggagaaaaaattttgagtagatatatggatagaattattccaagaattagtattagataattaaatttagtctttttcacgggcttagtctctctttattaatttattttggcgaaactttgaaaagtatcagcaataaatatactacaaatgatgatgctttttgtagatttacgtgatgcaaaagcgcatttttctgagtgtcaaatagtcggcagacgagagaattggggtaacacaagaaaaccccgccactggcgggtacctggcttgccaggtatcgttttcccttatgctcattaattagactagcacttaaattttactgtttaagaattaggttggcactcaaaagaaaggacatgattttatgaagaaaatagatggcgaaacacttcaacattttagattagataataatcaagttggcaaggtgcaaaaggaggtaaagaaatataacatgaccaaagcagaattttatcgcatggtggtcagtgattatttcaaaaatgaaactgttgcgaatttaactccagaatatatagatacgttgaagcaattaattgaaattctgaacgtaattggtgaacggcaaaaacgtattgaacgatcagttaattattgtgaagatcatttacggatcttttttgatgaatacgatggtgaggaggaaaactaacatgacaagaactactttaagaatgacaaaatccactgaaagtaaaattaattattttgaagctaaacttgaaaatgatcctgccttaattaaaaatattccatcctcaaataatggcctgattaatatgctattaaatgattatcttactttaataattaatgcttggaataaaagtcctcgaaaaagatacgaaactatttatcaagaatttttatcgacgcatgacacaaaactaaataatttaattaagcatgaacaaaaacaaatgaatcgaattaatgaaattctatatttgttaatggcaactaatcaagcagtcgtccgagttgataaagatgactggaaaaacatgcaatcaatgtttgaatttgggacaaaagaaaatgaaatttatgctaagttatcacagatggtagaaacagataacaaaaaattatttcaaaagggtaaataagttaatcctatttcgggggtaatagaatgactaaaatggtgaatataaaaaacaataaggatttctacgacaagttacatgagctagaggatttggatccagattggtttatccatgttggccaagagagtcgtttaaatacctatattgatgatggggatttaaatactgcagtaaaagatgttattaaggaacgaaatttattaaaagaagttcgagataagttgcaaacagatccgcaactatggagaagtgcagctaaaaaagatgcaattagattattggtaacttactataaaagattcgatttaagtaataaagaaatttcgcaaatattaaatattcccgaaagcacaattcgtcacgactatcagccattgaaaccaggagaaaaaatacatcctaagtttgaagttgaacttcgtgatcgtttcggaaaacatttaagtccaagtgaaatttagttgaagaacttgtcaaaatgtttcataattgaattagaaataattagaatgtgagatttaatatgaattatattgaacgggctgagaagctaatacttttaattacgtttaaaaagcatgatcaacagatagcaataccgcaagagtttttccaagaagaaagtgatgatatcaaattatctattgatgatcatcggattttgattactggtaatataaaattgcgtggtttactccagcaatataaaaaaattcttcgttatattctagacaataatgaaaaaacaaccttttttacgtatggtcttggcatccaaggcgttttagaaaatacgttagaaataaataatccggtaaatatcggaagtgtattaaatgtttttccagcaataacagataaattttcagataatgagacaacgtcaattggtaattttgatatatctttcacgtcagaattaaatggggacgaattagtagtatcgattagatcagaaagaaataaaatttcgcttttttcagctatatcgcatgatactaagaaaggaaaagatagtaacgacatgaatgagctttataaaaaagcgttaaactcgtttaaaaatctagttaaccaggaggaagttgattatgattgctaatacagttaacacgattaaaaatcacgatcacgaaatggtttctgttttttatgtacaatcaaatcaaaccaggaaaaattattttcaagatattgttactgaaactttctatgatataaaatttatatataataatgcaaattcgtcgttaatggatgcaagtaattttaagttgcttgcaaaaaatatgagcgagtattttagccctggcttaattgtgaatgtagaatttgggaaaccagttacctatttagagttaaaaaactctagaatatctgaagagaaactttttgacgaattttggaattttcgtgagaatgtttggtttgatttgccaaaagacttaactaaaaatcgtcatttagctatgggatagtatttatgtttgattggaaagaatatttaaatgttgcgaaagaacttgctaaaaattcagatgaatgtagtcaaagaattgctattagtcgtgcctattatgcagcatttaattatacgaaacatagaagaatatatgggacagaattccgtggccctaattcacatgatgatatgtggagagaagccttcagagatgagtcagaagaaagatattttcaaaatgccatgacactaaaagatttccgagtggatgcggattatcatgctagtagtcataaaattgcaaaagagtgtgaaaaaagtataaaacttgcggaagaaataatagattacgtcgacaaagcttgatgatatgaaggactaatgaaacaggataagcggattgcgatttaatgtataaactaattaaatttattttgctaatatatttgttgaagtcagcctaacagctggcttttttctttggcaaaggttgcttatttagaaaaaatcattgtaattaagtcgtaattatttgattaggagttaacaaatgataaaaaataatcaagcaccagatattatttatacccaacaattcggaattgctaatggagaaaggtatctccaatataccgaacgtaaagaagcaattaatcctagtccagaagatgttgaaattaccaataaaaattttcaacaagatccagatttaccagaaaactttgaaggttatcttggatatactgatcgtaaagctgccacaaaaatggaagatgacctggataaaaaattaaagggggactaccctactttttcgcaaggtgtctatgaattatctgaagaacagcatcaacaattaataaataatttaaaagaggctcaaactaataaatcgatgttatgggctggcgttatatcttttagcccagaatttttaaccaaagctgggctatatgatccgaaaacgaaaaaagtaaatcaaaaattaattaagaaagcaattcaagatgcgatgccaaactttctcgcaaacgaaggattagataatcaagaaactttctggtggggtgatattcatttgaatacagatcatgttcatgtccacttggcaattagtcaacgccataacacacgtccattaaaaaatggcgttcctaagggaatgtttaagaataaatcgattcgtttatttaaatctcaaatccatcatgaattagaaaataaaaaaagtcgttcaaggatgattgaaattgagaaagcacttgatgctactaagaaaaaattaactaacggattaacaaacgatgtaactattcaacaaaaaaattacttacagcaaattgctaatgctttaccggattataaagacaaaagaaaatggcgttcttcaaatcatagcgttgattttaaggaggctaagcaactaacggatcaattagttaatagtttattgcaaacaagcttaaataatgagtatttagaatatataaatctcttaaaagccaaagatgcaattaatcgtaaaaaatatggtcaaaaaattaaagatacggttaatccagcggataaaaaattaagagagtatctcgctaatcgaatttatgatttattaagggataacgagggtggattatagaatgaagttagccacccagttggtggtaaataaaaaacgccattcggcgtgacatcaggtatcatattaagtgaaccaaacctatatgaaaggatgtccgtcaaatgacgcacttaaatgataccatgtctactagtttattgactactcataaaaagaatgctcatcttactaaagaagaacgtgtgatgattgcgactttaaagtcgcaaggactttccaatcgcgcaattggtcgccaattaggagttaatcatcaaacaattaataacgagctcaaccgtggtacggtccgccaacttcgtcgtcaaaaatctaatggtaagatttacgaatattcttactacatctatagttatgaagctggtcaggccacatatcttgaacatcaccgccattctggtcgtcgtcgcttatattattcttcaaagcaatttttacgattagctgatcagctaatgcttggtgagtttgacgaccaccattactccccacaagcggttatttataaggctcgagatttaatgaatgatggcaccctgatcccaaagtcggttgtaactttatatcaatggattaatgagggtgtgcttcgtacgtccaatttagacctctttgaaaagcctaaacgtaagcatcatcgaactcatccgcaagctaaaaggtgcttaggtcctaatattgctcaacgacctcaaactgcggaccaacggtccgaaattggccattgggaactagatacagttcagggacagaaaaacggtaatgacagtgttgtactagtaatgactgatcgcctttcacgagttaatatcacgagtaaaattgctggtaaaactgcgcatgcagtaaatcagttctttataaatttacgccagaaaatgggcacagatgcttactatcgcatctttaagacaataacctctgacaacggttcagaatttagtgagttaacacaagttcacgatcatgttttctatgctgatccgtattccccttgggaacgtggatccaatgagatcaataaccggtttctccgcaaggagattaccaaaggtgaagctataaataactatagtagtgctcagatcatagcgactaatgattggatgaatcactatccacgagctatgtttaatggacattcgtcaatggatatctatcgtaaggccttctaccaagagatatcacagctccatcaaccaataatcaattggtcagtattatttatttgagtccagtggctaacttattcttgaaatttaggaagggataacgaggaacaatatcagaagaataacagtagcaataaaaaaagagacttaatggcacaaattaagtcacaaggtctcactgagaataagaaattattaaatttagaaaaggaaagattgaagaagcttgacccgaagtcaaaagaagccaaaagattaaaaatgcaaattggtttaaggaagtactacattcggcagattaatttagatgcacaaaaagaaagtttagatatgcggattgttcaattgcaaggcgcaccatcaacgaacctaaatcaatttttcctccattctttaaatgaacaaaaagaactaattcaattaagaaagttacctcgttatcgtttaacccaaaacccaaaattaatgcaacggtttaatgtgttaaaaaatcgttatatggatgtaaataaagttccaattaatctggtgactacaaaatcagttttagctaggaagaagcaactagctgcggaaattgcaatgattcaaagtaatacagatgatccatcaatttctttagtaattcctaatcctaatagcgattatcgaataatgaacgcaactgcctattacaagaacttagaagatattttagatgcaaaattacaaattcataaaaataatcaagcatatcaaaatgatttagctagacgcaatgaactcaaccggccacttttcactgaccttaagaaaaaatatgagtttgctcaaaacagtgaattaattgatactgagttggaacatcaattgacttatattaataataatcaaaagaaataccaaaaaaattcaaagtatcaagggataattaacagtaatttgagtcggcttttaggtcaaattaatcaagatggtcggaaacgagttcttgcgttaagaaagcatttaaacgatgaagatgatattgaaagagaagaccgtgaattagaacgagaagaaatttatgaacgatagataatattgctggcgaaatttgttctcataaaaaatatcagtttactaaataatagattaagcttttagggagactgataaattatggacaatgaatatgatattgggctaattactaacttaaccagtaacgttgcaacgggcgttattataggtactaatgaaccatttgagataaaaatgcgagaagaggttaaacaatcattaagccgctacatggttgtggcgattaacttggatcatactgactttatttatcaacaataatgttgtgattcgactttcacataatttgaatgtaaattataattataaaggtgatattagatgaaaaaataccaaaaacaattgaaaaataacttaagatttttgggaaacgttcctgttaaaatcttcaatagttatttggatgactattacgctaaagaaaacgacttaactccaataaagctaaagtttgagtctaaaaaaagaaatatagatttaatacaaaaaatatattggtggattgtaactacattaacggtaggaattattgcaagtggcattatttctcttagaaagtttgctacatctcagcatactaaagatcttccaagtatgattggaactttgctgattattcttgttgcttatctaattttgttagcaataattgaaattattatccagtctgaaaaaaatataatttataatcacttaacattgattaataaaaaaataaagagtatgaaggaagataaaagtcatgaaaagttggtgggaaaataatagcttaaaagtaattctttttgttatatatgaagtgctttctgggtggtatttgataaatttaaacaatttaaataaggcattgaaaggtagaacctattttgatattgcaataaatagttcagctcctttataccttttaggaagtatagtattactgggtgtagggctactataccttttctttttatatcgtaatttgtggcaggcagctactaaagattacttacttttgacagtagttatactcgctatacttacgataataaatatgatttttattatttatatgattcaaaatcctattttaagggcactcttatccgtgtatataattggtggagcagcaatatatgcttttaataattaattgaaagtcagttcaacggtgactggcttttttattacatcaattcaaatatttgtacatatgtgtgtacaaatattaaaggggctgatctaatataaatagaggtgatacgctatggtacaagcagttacaacaaaagatttcagaagatcatttaaaaaatatgctgatgacgtagcaaattataatgaagcaatcattgttgcctgtccagaacaaaagaatgttgttgtaatatctgaaaaagaatataactcttggcaagaaactaactaccttttaaagagcaaagcaaatcaagaagctttagcacattctattaatcagctagatgattctactaaacatcatttcttaactccggaagaatttgagaggatggcagcagctaatgaccaagcttaacattgattttacacaagatgcttggaaagaatatttaaattggaaaaaggatgataaaaaatggtaaaacgaatagataaaattattagtgatactattcgtcatccatttactggtcttggtaaacctgaaccattgcaacataatttatctggcttctagtctcgcaagcttaatagtgaacatcgaatggtatatggagtaacgagtaaagaaatacaaataattcaatttaagtaccattcattatgataaatagatacacaagtttgaggctgagaaaaactaaaattttctcggcctcagtaacacattggtcaacaatggtaagtaaacatctgttttctttacgagcataaaaaaagactatatacttaagttgttatacaagtacatagtctattctgtccatcacttaatagctgatggattttttagtatgtagcagaattcttctttaaaagatctgctaaaaagtcctctggaacttcgtcaacaggtttgaaagatcgaaaacttaaatcaagggaccgctcatgctccaattcaacaacgccatgaatgttatcaagccttggtagttttatatgcaacgggaaatacttttcgttagatgtgattggcataatctttaccataccaccacatagctgattaaaatcgttgtttgatactactaaagcgggacgatatccactttgttcatgtccttcagttgggtcaagactaatcttgatgatttgtccttgctttaagtctttataagattccatttaatgaaatctcccttctaagaaatattttattgccttcgccgaaagcgtgctggctccagcaattaaaacatttctttgccttgtggcttgccccaatcaatttctttgtttttaggctcatttttgaaatatgcttcggtatcaaaaccatcgaacatttttcttaatgggctttcgttcttctcaggttttaatataattttatcgtcttttagttgatacgatactttatcattgttacttaactttagaatatctaatacattttttggtattcgtatagataaactattaccccactttgataaagtgagtattcctttcgtgcttttcatgataaatccctccaacattcttcattaaacataccagctttgcgtagcttagttgctacaactacattatacaccatttcagcgtaatgtcgatacgtagttgatacatagacgtgaagttagcagaatcaacttgtccaaatttgaacgaggtgaatgaaaaaataaagtcagcttaacggctggcttcttcttttggcgtaagattgatttttcgttatctcagttactttgaatgcaaaaagtaactgaggtggcaattatgaccgaatatgaaagtaaaaacgggatggtaactgatgatgcaataaaaaattatttgcaagataatgagtatcagttaactaagaatcctcaagaagcgttatatattttacgtgatgggagcttaatttcgggtaattacgagtacgggtcacggacagaagatcaccgtatgattgaaggacttatttcagaaggcaaagagctttatacgggtgatccagaaaagttttggggtgcattacatgctaagacagggttgattagggtcgttccggaaactcaggaagccttaatcggagttaatcagtctttatcacagacccaaagagaattgataaagcgattggattatcaagtagacgaatatgttaaaatgccaaaaatcaagccaaaacaacgtaaaacagtacttgatatgtatgagcttggtgaagtcctggcgaggacggagcagcaagagggcgactataagggtacttacattgcctttgataaagaaaatggtacttactttggtctagataatcgcgatggtaaattaaaagaaccagttgagtatcatagctatgaggaagctaaacgcgcaattgatagtggtgcaaacttaaaagcttctcttgaattaacacaagaggttaaagatcggaatactttgactgttaaagctaaccggttgttggacgcaacattaaatgatcctgagagttttgaacgaacggtaaatcgaatgggagcgcttagagcgcacggtaataaattcaatcaaaatggcaatcaattattgttagctaatcatcagctagggacggtctatgcacctgcaagtgagtatcaaaaggataattcgttaagtaaaattaattttcaagagttacatggaactaaggtctttgtaccaaaaatcaaaaaaggaataatcgaactaaatccggctacagtttatgcagtcgaagaaattggtaaaaagcatcccgaattgatgaaaaatgctttagcaatcgctcgggaaaatagtcgtttcttaaatcagtcagctgcagatcggcgaagacagacaaataaagtcctcatattgactaaccaacgcctgaataatcctaaggcagccatgtcgcttcatattgccaggtatttaaccacttcttctgctggcttaaaagaagaatttaaacttagaaatgatgagaaagaattatttaagcaactatcagttaatgaacggcaaaaaatctttaatgaagcacaaaaattaagtcgtaagttgaatctaagagtaaaaagagaattttttaaagaaaaagagcataatcaggacaaacaactgaatagacctacaactaagtcacgtgaacgatagttggcaaaagataaaatgaagcaagcctgcttatatgatggaattacacacagcatataagggggctttttaatgtctgaagatgaaattaaacatcctttggcaaccctaatgaagcaaaagtatggggttactaaacaaagcagtttgagattaaactctgatgattcactatttgttgtttttcgaaaaattgcgaactatatttataaaaatggagaatggaatgatcaagattatgcagatgccattaaatcctacttggaaaatactgacagaggtaatactgacaaaagagaaattgcaagcatagtaaaagatcctggtggccaacaagtactaagaacaaatcgaaatacgtatacaatcaattataaagatgaaaatagtaaaaaactttatttcattcttgatcaagataataaatcttggagccatcagggggataattattataaggtctatgaccccaacgttacttgggtaattggaaatcaaaattatacattagggtacggtaagctccttaacgatttaatgcaggaatggcaaagcactaagcaagaggttccgcttgatgagtttaaggctcaactttatcgattaacgtctcataaatatgctaaaaagagttggcaaacgcggtttcaagagacagctttaggcaatttgagttatcaagaatttatgaccatgacagaaccgattgtcgaaaatgaggaagatttattaggaaaaggtcctgaagaattaaaaagaatctctagacgttttaaagcatctgctttacagaataacgagcagcttgcggaacagtatttaggacgtagggttcgttttaggagctggcaaacggcttatgaagcaaatcaaattaatcgttttatcaaaaattaccttgaaaagacttataacattgtgcggcagcaacgctacgaaagagatttagataaacaaactcatgctaaatcttgggaaactaaaaagaatattgataaagccacccaacaaattatggataggagtagtcttcatcgatattttagtaagatcgaattggataacgatgttgatttgaaagcatttggttattttgaagatgaagtaaagcgcttgatgagccatatgccattagcaaatgacaaaaatattttacgcttacgtaaactgggaaatcatcgagcgcttggtatgtatgtgccctcattagatacaatcgttttagaatttaggaaacaaagcgaagtacgtaaagactcaaacggtgatacggttggaattagctcatttattcatgagtatggtcattatcttgactatcatttaagtaagtggcctttatcattagaaaataatttcaaaccactgattacgcaatatacaaaaaatttagcaagttccaatctgtctgatagtaaagttgaatacttaactacgccaacagaagtatttgcacgaggctttgaattatggtcctatgaaagtgctaagctacgtggaaatttaattggtcaagaaaaagaatataacgctaaaacgggagctatcgaatatcaagcctttgatagtggtttaagagaacgattatttaattattttgatcaaattccacagctaaaggaaattaagccagaactagcaattgatacgtcacaatttgaaaaagtaaagccgttagaaacaaaagaagatttaagtgatgcgcatgtacttaaagatttatcggttaaggctctgcagcgatggacggataatccagagaagttagaacaattgattagtgttacggggacttcaatgcaaatgaataatcctaatcgcttattagcattagatcaattgcaattggagaaactgccagtaatggtgccagcacgagaacttaaacggttgaaggtaacgccagcgcaaggagttcataaggtgcgagggtttgtgcagaaatcaaataaacgttggatatcatctgaaatgtatagtttgcccgatttattaaaacagaccagtgataacttagaattaataaagcaattaaaagcattaggcaaaccgcaaaaacagtataatcaagaaaaagttaccaaacttttagatcaaactagcctgaaattaaaaaatagtgacaatacaattactaaagcatttaagcgtgctgaaagatatgtcttgcttgattcattaagcggacaggttaatcgacggccatttcgctttactaacgaggagcgtgaattattaaataaaggtgttcctgagttattaaaagttatgtatttacgaataactgaagcagctagtaaagaagaaaagaatttgcggatgaaacttcaaccaacaatatctaagaatattagtttaccgcttgacagatccaagacaattaaacgttaaacaagtataattaagaaaaaagagcagaggaagttatatgatgagtgatgaattagctgaagtagaatactttcgttatggggtagcgcaggtaaatttaattcctagtggtcggaaagttaaagtgattatcccagatgagaaagctgataatattgaagttggcggaatttatagcattagtgatgattatcaaacactagattgctgaatggaatggttaactaagaatattttatgatcaaataattagtgaagaacagatctgtccttaaatttaactaaaaaggaacgaaggtggttttttgaacggttcgcgaaaatgttcagtattttttaggtcagtactaaatcttttgacttattttagcccacagaactctgataatcgaaaagcaaagtatttttacgtcctgaaaaatgattatgagggttattctttgcaaaaactaaagggtattctgattgactacgaagtttcagtaagaaggaatgaattagctgctactgctattttggggttactgttttccgcactgctgtcaggactagggaaaagtgtgttagcctggtttcagactgcaacagagctttatgtattaaggttaatttcggttaagacgattccaaaagaatatgtaatgaaggccaatctgctatctggtatattggtagccattttgattattatcttggctttacttatttatcttgtcatagcaaatatctcgcgtaaacgcagaatctgtctagtgttaaaagaagttattaaggaaaaagaaaatgaatagttatcgtgcgcatgattggttacatgaacctgaaataattgctgaattaattatttctgttttatatgttattacgtttataatttacttaattcttctcggtatctttaacaaaagaatggaagacgaaggtcttacagatgctcttgtaaataaaataaatattttaggaacatcaaaaagtattcttgatgaaggaggcggtaaatatttaatatgggctgctctaatgattcttgcgtttattattgtaatcataatcttaatatgtttaagtaaccattcatatcataagaaaatctcgttagttattattgtagtatttattatagtttcaattatcttgtttgtaattttatggaacatgattaatataccgatacttaaagcatttataatttttacgggagccgtaggtataggcagcgcattaattggaacttctaattaaataagggcaaaaagtgggatgaggcgatagcaactagctaccgtcttttgttttactctttttaggtatttatctttacattgatgtaaaatagtgtaaaatatatgtagcatcaaaataagaggtgaggctaatttgaataattttcaaaaggcaattttcttgttgcagaatatcgacaagcttaaacagcttaatgtaaagcgatgactcttactgagttctctaaataactgatgtttcacggccaacgttgtataaatacattcagcatccagaaacaatgagtagttcgtttgtaaataaagcggccatgctctacgacaaggttgttaaatttcaagatattcttgatacagttcagcgtgaagataaacaatttaagactaccagcaggaattgattaagcttttagagtaatgtagctaatattgaagttacagattatacaaaagcaatcgcgacagtaattattagtgacttaaaagaagaaaattcaagtctgctaaaagcgttaagtaagcaattaccatttaaaccaaatttaaatgataatttgtcaaaatagtatttacaaattcgtaaatggtgttaaaataaaatcgtaaataatttaatacaatgactttaagaagttggggattatagactatgaatagtaaaaagaaaattgttacattagcaggagttagtttggttgctactgcaggagtagttgcttcaacaaatgaggtgaaagctgatacaacttctgataatgctcaggctgcagcaacgtcacaaacagctgaccaacaagcacaagctaaggttgatcaagcacaaagtaatgttaattcagccagccaagccactagcgcagcccaatcacaactagatagtgctaatgcggctaacagtgcagcacaagctgatgttaacagtcaacaagcgattgttaatgatgcacaagctaagtcgatgctgctacaagttcagtaagcaatgcacaagatgctgaaacaaaggcacaacaaaatgcagatcaagcttcaccagctaatattcaaaaggcacaagatgctattgctaatcaagaaactcaaattagtaaagacaccgatgctattaatgacgctaacaaagccgttagcgatgcacaaagcacagttgatgcagcgcaaaaaaagttaatgatgcaactactgctcgtgacaatcaacaaaagaatgttgatactgctagtgatgcagttaagaatgctcaagctattcttgacaacagtgatcaggctaaaaaggaagcccaagatgctttgaacaaggctaaccaaaaagttgctgatgatactactgccgttaacaacaaacaaactgatgttaacaatgcagcagaagctaagaagaatgcagatgaggcattgaagaacgccaatgatgcgcaaacttctgcacaaaagaataaagatgctaagcaagcaattgctgatgaggcaagtgtagcattagctgatgcaaatactgcagtaaaggacgctcaagctaaggtagatgcaatcaacgacaagttagcaaactttaatactattactttgcctgctggatacaaagatgacttaattgcatactataactattttggtaatagtaactataatcaagatgaagcgaataatttagcgcaagatcttcttaaatatcgtgatcaggcaatgagccagaataaatttaaggataatttaagtgatgatcgagtggtagatattgataatcttaattcaacagatcgagcagagcttagccaatttgttgcttcacttattaatcaagttcggacacaaatgggtacaaatcttgtgatctcatctcctgcagcagatgattatgcagaacaggtatcacaaaattataataaagataattggaattctgcagataacggaaagcatgatcaaagtgctctcaataatgcaactgatcaacttaatataagctggaacggtgaaaatatggggctggatcagtcaatttttacaacagactataccgtattgactgatggaaccaaattaccaactggaaataaacaaacaattaatgatctcaagcatttgatttatgatgattttatttcaatgatgtttgatgatgcagattcagcttggggtcacgctactaattttgctggaattgataactttgcagctgaaaagcaagctgttggtttttctttagataagttctacaatacacactatgatttagttgaagcaaatcaaaaagttgaagaaaatagttatacattgccttcaattaatgcactaacacaaaaattagctgatgccaaagacgatttatcaatcaagcaaactgatcaagcatcaaagcaaaaggctaatgatgatgctcaaaatgctttatcttctgctaatcaagtactcgtagcagctcaaaatgatgttaaagataagacagctactgctcaagaggctaatgacaacttaactacagctcaaaatgatttagctactctgcaaaatcaattaagtgctgatcaagctaaccaaaagcaagctcaaactacttttgattcgtttgatgctgaccttgcaacaaagcaagcaaaccttcaaaaggctactgatagtcttaaagcagaacaaggacgtttagcaattgctcaagctgatttagataatgctaataaggctttaagtgatgctaataacaatttagcccaaaagaaacaagtagttgaaaatgataatgaaacccttaaagttgataatgataaactagttcaactacagaataaccttagtgacttacaaaacgctcctaagttattagctgctgctaaggaacaagttgcgactgctcaaaaggctttagctgatgcacaagaagcttacaatgtagctaatgataaattaactagccttaagcagactgctgctggcactacaacaaatgtttctaaggcacaacaagctcttgcagaagcaaagaataatgaagatgctgctaaagaagtattggatcaagcacaacaagcattaactgaattacggcaaaaagaagcacttgctaagcaggttgcggaagaacaagctaaattagctgctgaaaaggaagctaaagataatggctaccatatcgaaaataaccaagttgttgacgctaaaggtaatagtgtcaatggctggacagttaagggcaaccaaattgttagtccaactaatgctactgtagatcccgctgtttctgtaaccaccaatgtcaatgttgatagtaaaggtcaagtacaaccacaaactagtgttactgctaatagtgttaagactgtagctgcaactgaatcagcaaatccagtagcaactactactgtgcaaacccgcgaacaatacaagcaacaattgaagagcaataatcaattaccacaaactggtaataatgatagtgctgttctttcacttgctggagtagcacttgcagcaatgttgagtttgttcggtattaagaaacgtgaatactaatttagaaaatgtaagtattattatgtaaaaaggttcaaccaaattggctgaacctttttgtctaaaatttaaggagaagttttatggatatgacccctgaagaatttgagaatgttgtaaaaagacttcatcaagaagctcaagaaagaaatttaacctacgtgtttcctaaaggtcgaatctttaatgtagaggaagcgtttgatgatgattattcatatgcaaagattaatatcaaaaatgggaaaagaaatatgttttcattggattgaatccagctagaaatggatcacccttagcggtatataagaaaagagctaaagctaaagaacctttggaaaaaatcgttgctaacggttctgcatggaatcgtgcattaaatcatagtggaaggttggaagattttaacgagttaggatcgatatattttcttgatatatgtgcaaccggaaccttacaagcaagtgatttgaagcaagttcaagctgaaagctatatgaagagtatagagtttatctcaaaatatatatctaagtatcttagcaattcaaagatagtattatgtccaggtggaaaagcaaatagtaagaagattcgtaaagctctctatgaaaaaattataaaagaaaataaggatcgaatatatatttatgggttatcaagaggagtacctagacatattattgggagcaagggtactgatttaagactcataaaggatgatcaaattagtacagtttcaggaataaagtgaacttagagtatcgataaaaaagctgtgtttctttgtcaagatgaataaaacacagcttttttttaagaagtcatgagtaaatgtacgaattgaccaaaatgtaattatcttttagtatagaattgttacttttgcgtaatggctataagaagcagttatattaaaaaggagcataaaactatgtttaacaacattaaaaatataaataaagtgatggggggggggtaacgccagccctctagctgttacatttttagctactgctttaaaaagggcggtggcttaaaatgactttactaaccgaagatcaagttcgagatcgggcaaagcaaatattacattttgaaaatgatgctaatgcttttgctggaactgggcaattaacaagtttcaatacactaggtaaaagtttttctcaaaatccttggaagagcaataataataagcctgatggatggtacttacctaaaaataaaaataagccggccttaattttagaaactaaatctagtactaaagacttagacgatgtggcaatacctgagttgcaaaaaaatatgtcaattgtacttaaaagatatccaaacgtaatggggattgcttataatggacaggatgtgcgtgtttttcgtaatgaggatccgggaagcgatacatttattgaagctcaattatctaaaacattagagaataaggattattacattaaagtctttactgataaacctgttgatgtaaatgaaatttatacattgacggcgagaattaataatgctttgcattttaaatttggcattcgtaatttatatgatcgcatgatttttacagcgggagctttagtcgccgtacgttatggcgcaaagcttgaccctgatgatgattataatgttttacagacttctatcttatccaagctgaataaaagtctagaaccttcactaaaacagaatttaaaacttaataatgtaattgaggtttttcgtgatattcaaacgaattttgacccgggtcaagaagccattaaaacctttgttaataatataaataaaattagtcaatctataaattcaagccactggcgtggtgaagatgtaatggctattttctttaatgaatttaataaatataaagctaaaagtgataatggacaggtttttacaccacaacatatagctaattttatgtatcgtttaattgatgttagtatggatgattctgtactagatgctacctgcggttccggaacttttcttaccaattcaatgtctaatatgattactgaagctggtgggcctgatgctaaaaaagcaaaaataatcaagcaacaaaagctttatggaattgagtttgataaaactatttttgccttagcatgtgctaatatgatgattcataaagatggtaagactaatcttaaccgtgtggacgcaatgaccccagaagcagcaaaatggattcataatatttcatggctagatcctgaaggtgagcgggataatgatgaatatttaatacagaatgataatcaattgaaacctcaccatataaccaagatattaatgaatcctccatatgaacataagtatcatcctttagatattttaaataatgtattagataatgttccccaaaatactgatgctgcaattcttttgcctgattttaaacttgaaaaagaagggaaaaagaaagtaaagcatctactagaacataatcgattaacaaagatcattaaactacctaaagaaacatttaatagtgaaggtgtttcagtttcaatttttatatttgagactggtcagccaacaaatcctgatgatggaatattcacctgcgagattgcggaggatggacttgaaactgttaagaatcagggacgacaagatataaaacaccgatggtcagcaattgaagacttttgggttagaactattaagcgttgtgatacacaagcagataaatcttgccaatggattacacctgatttaaaaaattataaacaattaagcgttccaatccctcagaagccttttgtgatctatgatgaggactttatgaaaactgttatggactatgaaatgtttaaacaaaatattaatagttcaaagttgcaagatgctttaaaacaaactgtactttatcagagccaagtagtagaaaataagcaaaatattgatattaaaataaagaagggagtaacaaatgaatcaattgaataatgatagatattggaaagaatttaaattgccagatctagaaataaattcatatggtactcctacacttcatttacgacaagttgaggcagcttctgaaattgatcctgattgtgaaactattaattatattacacgtggtaaatttaataatggtgtaaaattaagagtcattaagaagccaaattttaatattattcctaaaaatactattagctttggcggtgaaaccggagagtttttctatcaaagagaaccttacgttacaggacgggatgtttattatattgatacatcaaaattaacagaaaatgaagcgttatttttattaacaatagttaggaaaaaattgcacactcggtcaacattcaatactattatgactgcttcaattgttaacaatacttcatttcaattacctgtaaatgagcaaaataagccagattggcaatacatgaatctatatattaacgaattacgtcaaagggcgttagaaaaattaaacattatcaataacattaatattcaaccaacatctatcaatagccaaaattgggaaaactttaagtttacagagttatttacagtaaataactctacaaatgttttaagacgtgaagtcgatttcggtaccggttcaatgccctatataacagcaagtagtatgaataatggagttgtgtcttatattgatgcaagcaatttacccgttgatgaaggaaactgtttactaattggaggaaaaacttactctatttcatatcaacgtcaaaactttgtatctaatgatagccataatcttattatccgattaaaacctgaatataagcagtatgcaaccgagaatgtttatttatttttagctagtatctttagagcatatagttactattataattgggctaatgctgttaacaaaaataaattaaagtcatcgactcttcatttacctataattcaaaaaggagtgccagattggcaatatatgaatcaatttattgatcaaaagaagagccaagtaaaagataagatagaagcttttggtaaaatttaatgagatttgatagtgtaaagtaaggttttctaaagaaaaatctgtattccttgttaagatgaggaacacagattttttttagtttaaaggggagtttacaataatggataaattatttacggactattatttagaatggattcatatgtataaagaaggatcagtacggcaagtaacattagataagtactacttaactcatcgagaattacaaaaaaggtggccactcatgaaagttaaaagcattaatcattataattatcagaagttaattaatgaatatgctgaaactcatgaatacctaaccgttaagggatttcatcatcattgtaaagcagcaatcatggatgcaattgaagatggactacttgtgaaagatccaactagacacttaacgatcaaggggaagcgtccaaaaacaaagaaaattaaatatttgagtttgttagacttgaagcgtttagttaaccagttggacttaaaggctgatttaaatatagattggctaatcttattgatagcaaagacagggatacgatatgcagaagcattaggaattacagttaaagactttgattttgaaaatcatcagttgcaaattaataaaacatgggactacaaatccaaaaatggcaagtttcaagagactaaaaataattcttcagtaagaaccatcagtgtagacccgattacatcagaacagtttcaaatgctaactaaagatttaaatcctgacaagcccatttttctacaaacaggtaagcgaatatatatttccactattaataatcacctcaccaaatattgtagaaaagccggagttgatgttatttctgtgcatgggttaaggcatactcatgcctcgttattaatctatgatggagtttcaattcctagtgtggcgaaaagattgggtcattcaaacacgatcactacgcagcaaacttatttacacatagtaaaggagttagaagcgcgagataatcaaaaaatactagaaaatatgattcgattgtcttaaactttgtccaaatttggacgaaccaaaagggaaaataccttaccattttgaatttaacttagtaattattcggtttaaattaggaaagattacataaaactgtaaaattttggcttcttactcagaaacgaaataatgctgagtacgataatgcaatgaacgagtacaatgcagaaatggcaaaactgaatcaaggcgcaaacgcgccggtcattacaacaaacagtgttaatcaagctttgtcgttaaaaccggaaaataatgcaactgttgatatcgaagcactaaatccaagaattacatttaaacgagttgaagaaggtactaagtatgctgggtatcagatttttgataaaaataatgcatatgtcaacaatattgacggagaatttctacgagttacctatacgaacttaaaaaactcaacatacaaaggatcaaaaattagcaaaatcgtagttacttattctgacagcacccctactggcaatcgtattactcaaagcggattaaatgctgttacagaaggtgctaacgataactttttagtagttttcgaagacccagtgcggggagatatgcattcaactactgtaacagcaacttatcagtattacgatgcaaacggtaacttgattgatttttccggaacaaacaatgcatggctttcagtaggatctctaaactttgatcagggaaatgattatcaaggaggtaaaaatgaaggtaatccaacaagtgggattagcgaaggcgttaaactgatttccggtgctcaaattaaacaattagctggatcatcaattagtgttcatgatgatggctgggcttatgccggtttcaataattatagtggtactggtatgaataatggtatcaatactgataacggtggttctggctgggatatggatggatctcctaatgcatactatggtgcgattgtttttcaattaactggatctagtgtttctttacgacagggtttagtctcatggggtggagctgatattgcttcccagtataataatcagttcctaaataatgcttggtttactgctggaacaaccttacctgaaacacaaattaaacaaccaattcgtaagacttccgaaacacactatcactacaacccatccgtcattcgcttataatcccgaacaatagacgagaatagtttctttcttcataccgcaaaataaaaagcgccaaccaaagtcagcgctaagattactacttgagtaaccaattaattagatgtttaatgtgcttactaggcacaattagaatgattggccaaatatggctcatggggttcacccccagttgcacttataattagagattggtagtctcagagtgcttaattattgtaccataaaaaaagtatgttataatgtttatattagaatgattagccggagtgcaaaacggaatcagttggttacttattccgaaccggttggggcgcttaataggcgctctttttgttttaaaacactaaatcatctatattgttcggaaaatataagtcaatagcggatgggttgtagtgatagtgtacttcagtagtttttcgttgtggaatactaccgttttgtggaataacggttgttaattcagcccaagcgcccgaaacacttctatcagggaaagcattaagatcaataacgccgtcttttcgcttagttcgagatgcctgaagagctaaatcactagttgcatgtgcgtgccatcgtagagataacgttgtaccagttaacttgataagtccagcaccataatattgcattggcgaaccagttttatcccattcatctaaattatatggtgagccccactgcttggattgattatctgaatcagcataaaagtcgttaccgttatgaagcttaactgatgagcctgctattgcaaaggcttttccaccagcaagaacttggcacgcttcaaaaacatttccagcattttttctactccattatccatatagtcataacgaccgccattaagagacattggtgaaatgtaagcactgatttttgaaaaatcaattaatttaccctgatcatcatagtactgaatatccgtatcaatctgtccagaattataatttataaacttgactggattattgaatacatgaacagattgcaacattttatttgcagttgaaccaatagattgaccattacttaaagttactacttccttaacgatggcatgtttttgaccagtttcgtctatataaaacgaatgtgtaaggttagtgaaggttactgtaccgattaatccggtctgattatttccagcagaagaaaagtctatcgtatcatatttgctgccatcagcagcaacatgattttttgtaatcagatattttgaagatatatcaactgaagcatttggttcattttgcaaaactaaattttgaacaatttcatttggattagcaccatttggattacttggtgtactatttttccattttattaattcttgctgatattcatcattgttttgtttctgagtaactcaattaattatctttataatttaaatatttaatggcaattgtacgaatgattttagaatgatttcttaaatagtttgaaaaaacactaaattttggcgaaactttgaaatatagaaaaatagaataaattctcctttgaaaaataaattaatttgcaaaggagattttttttatgattgtaagacaaaaatcaaaagttattccaatcgaaaaatcatctacacattacaagatgtataaaggtggaaaattatggctaacggctggtattactacattatcaatggcaggtatgatggttgctgcaggtgagttgcagacagcacatgctgatacaaccacaacagctaataacacacagcaaactgctactggtggtaatgcgataacggctactacaagtggaacatctggacaagctggcacaattacgcagccagttaatgttgatcattcgcaactgaataatgctgttgatcaagctcgtcaagctggattgactgtaaatcagcaaccaacaactacacagactgtaaatcaggatcaagttgatgctgccaagcagagtattcaaaatgatgaagctaagcaagcgcaacagattcaaacgattactcgacagcatcaaacagaagtgtccaatgttaataactttaacggctctaagggggatacttcccaacttgatgctaaggtaaaagaggcacaatcaatccccggattaactgttgtacatgatcaagatcaaaccactgtaaaaaaagcttctgatacacaaggtatccaagaagcggttaataatgctacccaaagcaataatgaccaagctcagagtattcaaaatgctatcgatactcagaaacaaaactatgctaaataccaatctcaattaaatgatttagcaaaagatcaacacgttacagggcaagttaattgggataatggtggatacatgaatgctcatccaacttatgatattacatggcactacgacttacagcgtaagaaagttgtcgtaactaacgttcacttaacgattccatcaggattagcacctaaaacaggtggcggcttctgggacacttatgtcattaaacgtgcaattgatcctgcaccagttaaagatccaacaagatggccttttgggaaacaaggagatgcaactggtgtagacggaaactcgttaaaggagaaatatttcccaggatcacttgccttctacgcgcacaataataagacgcaggaagaagtaaaggctattaaggattatcatggcagttatgatgctatacagaatccagacggaacttggagcttaatcacaatttatgatcgttctggaacaagcattcagcatgattatccaaggtatggagacccagcgtgggccgaatggggtgaaactgcaccggtggctactgttacgttacccaaactaaataccacttcagccaactatcactacaacccagtgatggtacctaagactacaattggtgatcaaccagtcaattaccaacttcatgacttaaatgttaagactacgcctgaaaagaactgggttaatggtattcaaagcgttaacaacaaggtaggaatcaatgacgatgtggtaactaccaaagttgatatgaattatcttggttcaaatcagattgaaggtggtttgcatagtcttaaggttactgacgattattccaaatttgctaataatgttgactatgctggagcacaagtttacgagaatgaagaacttgcgacaggtaattatgatattactaataatggccaacaggttacggctacacgaaagaaccctgaatctgctaatggtggtaaagtttccttagtaattgactttaagattaagccaaatgttaaaactggaactgtctttgaaaattcaggatccggaactatcaatgatcaaactgtaccaacgaatgatgcacaaattaaaacctatgaacaagaaacagtaaaacactggatggaaggcaagaatattgtcgatgataaaactgaaattaacggtgatattgttactactcaagttcatatgactttgccagaccaaagtactttaattgcaccattaagttatgtgtcaattgacgataactatactgattttgctgataagacaaatcttctttcttatcaattatgggaaaatggtgctaatgtaactgatcaatataatattactaacgaaaatggtcatttaacggctgtccgcaagaatgcttcagcagctccagcaggagaagttgttttaatcggaacattcaagattaatgataatgttcctaatggtactaagttagtaaatcgaggatctggccggctaaacaatcatacagttgagactaatacgccagcaattgttacctttacgcaaagcgttgataagcattgggtagaaggttccaataccgttgatactaagacctatattgcagatgatgtagcaactacaaacattacaactactttacctgaccctaatagtttagctaaaccattaacatacctgtcaatcgatgatgattacactaactttatggataaagctaaattacaaagttaccaagtatgggaaggcaacagcaacgttactagtgaatacacggtaacagataacaatggacacttaacggcacggcgaaacgatccaagcaaagcgccaggtggcactttacgcctagtagcagtttggaaaattaatgataatgttccttctggtactaaactagtaaatacgggttctagtcgaattaacaaccatacagtagaagccggcaaaccttatgtagtagtttatacacaaactacggacaaacactgggttgatggtaatcaggttgttgatgataaaacttacgttgatggtgacaatgttaatggtcaagttactatgtccttgccaaatccaagcgatttagccaaaccattatctaatgtaattattcgtgatgattacactaaatttgctaatgatgttgactacaagtcagcaacagtaactgaaaatgataatgatgcaactgatcaatataacattgttaacgagaatggggtagttacagcaacccgcaagaaccctggtgcagcacctgctggtaaggttcaattaaatgttatctggaccactcatactggtttacctagtggaacaaagttagttaacagtgggtcaggaacgattaatggtaaaactgtaaatacaccggaccgaacaatctatactttccataatgatagtgataagcactgggttgaaggaaaccgcaaggttgatggcttaactcagattaatgatgatttgattcatgctgaaatctctaccgctttaccagatccaagccaattagctaaaaagcttggcgaaattcaattagttgatgattggtctgacttcaaagacaaggctaaggttactagttatcgtgtaactgaaaatgataaggatgcaactgatcaatataacgtagtagttgataataacggttttgttactgctactcgcaaagatgctagctcagcaccaggtggcattgctaaactattggttgactggaagatcaatcatgatgttgccagtggtactaaactaagcaatactggttacactttgatcaataagagtcgtgtagacgttcctactgtcgacactgttacctttaccccaaagacagataagcattgggttgagggtaatcaagacgttgatgataagacttatgttgctggtgatgaagtgcatgggaatgtctcaatgacactgccagaaccagagcagttagctaaaccactttctaagattatcgttattgatgattatcgtaactttatggataaggttacctatgagggtgctaatgtctacgaaggcgataaagacgtaacttcactctatgatgttaagaatgaaaatggaattgttactgctactcgcaaagatgctagctcagcaccgggtggggtagtttatctgaaagctaactggaaacttaatactgctatccctaacggtacggtcttgactaaccgtggttcaggacagattaatgatgatctagttccaacacccgatcgtaacatttatgtctttacacaaacagcagaaaagcactggaaagctggagaccaagatgttgacagtaagactgttattaatgatgatgtaattcattcagaaatttcgatgtcattaccagagcctaatagcttagcaaaatcattagaagatgtagcaattgaagatgattacagtgacttcaaggataaagttggactaccaacagttaaactttatgaaaatggtcaagatgctagtaccgaatataatgtaaccttaaaggatggcgtgattactgctgttcgtaaggatccatctaaggtgcctgcaggtaccttaaccatgaacgttacttggaaagttaatcacgatgtggcttcgggaactaaattcactaacaaaggtaccggaattattaaccgcagccgcgttaagactaatacaccagatgtagttacttttactccagaaaccgataaacattggaccaatgataatgatcaatctgttgataatatggtcttcatagctggtgataatgtaagcagtaaggtttcaatgtcgttgccagagccacagaacttggctgaaaagctcaagaaggttcaagtaattgataactttgcgactttgcggataaggttgatcttaaggggtattccattaccgaaaacggaaaagatgctaatgatctttataactttgaagtgactaaggatcatcaaatcattgcaacgcggaaagatcctgcaacgacgccaggggaatcgtaattctacgggcgcaatggactttgcataaggacgttccaactggaacagttcttactaacaagggttctggtcaaattaatgatgacctggttccaacccctgatcgtcaaattaagacttatactcaagatacagataagcattgggttaataatggtggccaagtagttgataataagcttgcaatcaatgatggagttgttactgctcgtgttgatatgacccttcctaagtcctcaactcttggtagtaagattcataaaattcaattaaccgatgacttctctaagtttgctaaagatgttgaagtgcaaggagtccatgtctttgaaggtgataaagatgtaactgatcagtatgatatttctattgatccaaatggtaaggttgttgcaacccgcaaggacccatctaaggttaataatcatcaaggtgaattgccagttactatgcaggcagtaatgaatgctaaggattccttagatactaataatttagtcactaaagcaactggtaacttaaacaataacctttttgccgctagggccggattattcaatgcttcctttattcaaactcatgtatcttcagctaatggcaagatcaattcacaagttgatatgcaacttccagaaactagcgaaggggtaaataaggtagcagtaaccgacgattatactaacttcagcaaatatgcccaaccaggagctgttcatgtttatgaagatggtaaagaagccactgctaactacactgtttcagatgatggtgctggtcatgtaacagcaactcggaatgacactgaaaatcttaatggtggccaagtttcaatgaaggttgactacaagatcaagggtgatattcctaatggtactgttcttgaaaatcacggttccggaacaattaacgatgagacaattccaactaatacaccatcaattactacctatacccaagaagctgaaaaacattgggtagaagatgatcaaattgttgatggccgggtagttattgatggatccgtagcacatgctaaggtcactactaccttaccggacccatcacaattaactgatccacttactaatatgtcaatcaaagatgattattcgaaattcgctaaggatgttgatcttactgatgttcaagtccttgagaatggtaagttagcaactagtgagtataaccttgaaaaaggtgacggttttgttatcgcaacgcggaaagaccctgcaaagacaccaggcggtaatgcacaattgctattaacatttaacattcacaaggatgttccatctggtactaaacttgagaatgctggatcatcgacaatcaataatcatacggttaagactaatactccttggattgaaaccttcttaccaaatccaacgaaggatgtagtaattagtgttgataatcaaaagggtctcaatggccaaaagattgagttaggccaacgttttgattataagttggttgggtcacaattgccggctagtgtaacagcgcttaatgaatatggttttcacgatgattatgatgaaacgcatgatcaatataatgcgggttatacagtcctcttaaatgatgatattacgttaaaagatggaactgtgcttaagaagaataccgatgttacaaaatacacaacacaagttgttgatacagaaaatggtaaagttgatattgaatttgataaaaacttcttggcaagcgttgatctttctaagtcatcgtttggagcaacagcttatcttaagatgaagcgagtaaagagtggaacagtacaaaacaagtacacaaactcaattaacaacattgactttagttctaatactgttacaacaactacggaaacggaagaacctaagaagccagaaacaccatctactacacctaagacgccggaaactccagttacgccaactgaaacaccaaagacaaccccaacaccaactcctgctccacaagtaacgccagtacaagaaccggttatggctgcagtagcaactcctgctcaagttgccactccagcaccacaacaatcaagttctgcggctcctcaagaagcattgccacaaactggtaatgcaaatgaaagtggattagttgcagctggattagctggattcctagtaagtctaggcgcatttagtcttaagaaaaagcgaaattaattagtttgttttacacataaaaatttcatatctcctttaaagtaaaaaggctcagcagtttgctgggcctttttgcgtgaacagtgtcaatggcgaaacttctttttttctcctttagtgtaatagtggattttaatatatagagcaattttgatattggacgggattaaaaatggataaaagagaatttagcctaaaactttatcgaatctcagataataagttatattacttagtaactgcctattctcaaacggatgcaatagactatctccttgaagaattaggacttgagacaagggataaaagcaactattcgattaaagaaattgatatttcaacgccaggccttatttataatgaaacaatggtcatgtcaattactcagcaaaaggaatacagcgctagtgaggtagcaaaaatgattgggactactcctaatatgatcggacgaattgctaataagttaaaaataaaatctaaaacatcatgtaatcaatatggccggtgggtttctagtaaatcgcgttattcaagtaaagaaataactcagtggatgtattatcaaacagcaattgacttaattaggaatacatttagcaaaaagaataagaagattagttatcaggaatcactttttggagaagattatgaaaaacacaattgatcaattatcattaacccaattaaaattcagtcaagccggaatgaatagagacactgctacttggttagctttagaagctaaactgccattagaacaacaatgtgcttgcatagaagccttagcgttagagcctaatccaaatgagaaggttaaaagattaattattgctagaggatttcaacaacggcaaaggcaacgaattcttaacaggtaatgaaaacaattaagtaaattaagttactgtgaatttgtacataattttcttaaatttaattttcagacaataaataaaaaaagagcgcctattaggacgccctctcaaccgactacttgtgagctagaaagcacccacaacacacggccttatcatattagtaactatattataacacaaaataagtatggcccaataactaggcacatttgagcaggcgtaggaaacctgactagtgcagagaggaggcaactccttatgacgcatttgtgtctaataagcacattaaaaagttaattaaaaaagctatgcgactattcaaatagctttttcagcggtggtatttggttactgtcgcttttttattttcctgaaagatagataaagaataaaactacaatagcgattaatggtgcgaaggctagtagaaagaaaaatttactaatcttccagaaaatccaaagaataaaagtaaagccagtaaaaaagaatacgttggagttaaaattttggaataaataatcccatccaaatgtggcgaaagggtaaaaaagggctagaacacatagaattaaacaaaagataccatcttttttatcagtaaagttataaagaataaagataacaaaataaactgatagatagtgagaaaaaatataacctttatctattctgccaatagttctgttatataaatttaacattgatgtaaccgcccttctatttatttgttgcctctattttacactttatttacatttatgtaaatacaaagtttacaccagttaaagtgtggcgaaagatactaaaaagctcattccaatttacttttgaagaaaaagttaaggagtgataacccatgattcgagttttctataagcctaattgtaaagcttgtctaatgactacgcatttttttatcgttcaccacatcaaatttatcgatattgatctttctcaaagtcctcagtatgctaagagtcttcatgataaggggcatcttaaggtgcctgtagtcattacagatacagaagaatggtcgggatttcgtcctgataaacttaatcagcttctccaaaagcaacggctaatgcgggtggagaggtgatcaacaatggctgcagttacagaagagaaattatcaaacgtagataaattgtgtcggcaatctattcagaaatatttagatattaaaggaattccttatgaaaaacaaggctattatttaagactaactgatcatgattcgctagttgtcgatacaagaataacctcacagaagccatacgagactttctattggaattcgcaaggcgttggaggaaatctgtataattttttaagatcatatgaaggactagaaaagaaaatagcactagatcaattagaaaaactagctccagaattagcaaaggcaccacaacaccattatcaggtagttgaataccaaccagaaaagtggccaggtagtcggcaaaatcaacaaatgattaactatttcactaaaactcgtaagttagacgagcgcttgattcaagttctcattaaacatggcttaattaggcaattacgtaacggtagtgcattcttttcctggagagataaaaatatgaaagaaattggtggtgatgtgcagggaacgatagttgatcataaaagatttgggaaacgtggcaccattaaaatgattgcaaaaggttctgctagggaatttggctttcgttttaatgccaattcaaaaaacgatgacactaaaaagctatatatttttgaaagcccaattgatatgctgtcctattttcaaatgcatggtaaccaaccaggtgctaaaacttttctatcgcttaatggtgctgctaccaaggtaaataccgttagtaattacataactaaatttggtgttccagatgaaattcatttagcgttagatactgatacagcaggattgaagggtattatacgcattaatgggaggcttgaaacacttagaaaagaacaaggttgggataatatgaaaattatagtagatcagcccaacagcaataataaagattggaacgatgccttgaaacttaatgacaagcaatactatgctgagtccatgcacgactttgctaatcgtaagactaaagaattaggagtaaaacggattcgacaaattatggatgaaatgctagctggtaatatgggaaacagtaaagcaataaccaataaagtaaatccacaaaaagctagttttaaacaacattttgaagataagcgaaaagaacgttaaagttcaaatgatcacgtcatgaagaaaaaattcatggcgtttttactttgtccaaatttggacgaaattaggcgaaactttggtaaatcaatagctactgtatcttaaattcagttgaaataagaaaatcaggtgaaattatgtttgattatttaatcttaaccgaaaagaaatcagcatttgataactttgtcgctgctcttggtggagaaacaggaacagttaatggccatacatatcaactaactcatgctcaagggcacctactagaattcttagatccagtagatcaagttgcaccaaacttgaaagataaatatgaatcttgggagttaaaagatttgccctggaacttacaagatttaacatggcgaaaaaaagcgaaaaatggatcagcacagaaaatgattaaaaaaattgctaatgagagtcgtcaagcacaagcaattgttattgcaactgataatgatccaagcggagaaggtgaacttcttgcttgggaaattattaatgctatcaattggcgaggaccagtttatcgtgaatatcatgatgatgaaagtaaaaagggaattcaaaaagcattaaggaatttacgagatatttctagtcagaaaaaagatggtgactacattaaagcggttttacggcagcgatgggattttgcgtctatgcaagcaacaagggtttctacaacattagctcgtagtgaaggttatcggtaaaagttattaatcaaggacgattaaagtcagtaatgcttgcttttacttttgatcaactgcagcgaatcaagcattatcaaaaaaagccttactacgaagttaaatttaaggataataatggccatgtctatgctcgcaaagtaagaaaagaagacgaagaactaattaaaaagattcgtcatgctgatattaaactagcgaaacaagaacaaagcacttactcatcgcccgcagaagtcaaattattaagttgtacacgaaaaaaacaggtccctaatacattaattgatatgaccggaattgatagtgcaatggcagcaaaggggtattcttctgcaatggtcgaagaagtttaccaagaactttatgaaaaacattatctatcttatccgcgaacaggagacaaggtgattactaatgaccagtttattgagttgatgaataatgctgatcaaatcgcagctgtaattaacgtcgatcaatcgcttttaacacaccgacaaccaagagaaaaatttgttaaagactcagcgactcatggggctaatcggcctggtgaaaagattcctgaaacaa

SEQ ID NO: 52 - DNA, 165920 bp, synthetic construct
  misc_feature 1..165920: note = Based on Lactobacillus reuteri
  source 1..165920: mol_type = other DNA
atggcaactgagaatgcaatggcaattgtaaaagctgctcgaagtgataataaaataactgctaaagaaattatagaagaagtattttcagattttattgaattccatggtgatcgtaaaggaacagatgattcagcaattcttggaggattggcaatactttcatctacaccagtaacagtaattgcgactaataggggggaaacagttggtgaacatttgagtacacattttgggtgtccaactccaggtggctatcgtaaagctttgcgtttagcaaagcaggctgcaaagtttaatagaccaattatatttttagtaaatactcctggagcttatccagggaaaacagctgaagaacaagggcaaggatctgcgattgcgcaaaatattatccaaataagtcaacttccagttccaattattactattatttatggtgaaggtggcagtggaggtgcattagcattggcttgcggtgatcaggtgtggatgctagagaatagtacatattcaattttatcacctgagggttttgcctctattttatggaaagatggatcacgtacagaagaagccgcagaattaatgcaaatgaccccaaaagccttgctaagacataaggttattgaaggaataattccagaaagtaaagatcacaaagtaacatgtcgagcaattgctaatattttagataaacagttacaagaattaggaaaactttcagcggtagatttattgattcaacgaaaagaaagatatagaaaattttagttagtatagtaagaggagagaatacattacggtgcacgacttattatcgcttaatagaattaaagaattatataaagagaaagcaatgacaaattgcaactttttttactttaataaagtagattctactcaaaaaatagcaaaatattttttagaccatttaaatatcaataaaccatgtactatttttgctggaagtcaaacgagaggctatggtaaaagaaataggctattttattcaccacaaaattcggggatttatatgagtataattattccacaatacgaaatgcaaaatgaggatattggtttattaacaatttcattagggagtggaatactagaagttttaaagaagtattatcctaaaaaaattttttatttaaaatgggtaaatgatattctattaggcaaggtgaactactcggccataaatgaccgagcttctgggaacacgaagtagtatttaggatattacacaagtattcttgctacctaacttacagaactccgttcttttaccaaggctagttcctagccaacggcttttaatcctttttgcaagatgttaactgccgcattaacatctcggtcgtggtgaacgccacactttggacaagtccattcgcgaacttcaagtggcttcttgccactgttaaagccacaatgcgaacagatttgactggtatagtttggtttcaccaagactagttgtttgccataccaagcacacttgtattccagcatcgtccggaactgataccaactagcgttagcgatcgacttcgctaagtggtgattcttttggagattcttggctttcaaatcctcaataacaatcacgtcgtactgcttaactagagccgtcgttagcttgtggaggtaatccttgcgcttgttggcaattcgttgttgataatgggctttaacaagtcgggcgcgttgccagttctgataatcattgagtgctaacttggtatcttggtggttgtgattccattggcgaacggcaacggttgcccggtggcgccgcttgctgaatttactttgccacttcgttacttgatgttctaacaatttagcgttgaaggtaccgtacttgacaccatcagaactaatcgcaaggtcggccaggcctacgtcaagcccgaccatttgccccgttttcggtaaccgttcaacggttgtttcaacttgcagggagaggtagtaacgacccgtcgggtcataactgaccgtataacgcttaattttggcctcaccaataagagtcgttttactcgtgcgtatacttccgagttttggtaattgtaaccgccgcttggcaagtaccttgcacgttgatcggccagtgtaggcctgataggccacatggcggctcttaaagcggggatagccaccttggtgcttaaacaatcgtttaaaggcctcggtaagattatggttcaccactaggaaactggtggaatcactttccttgagaaagggatattcacgcttgagctgtttcaagaggtagttcataccatactcattgacgaagtggctactgggattgttttggtaacgctccttagccatactgagcatttggttccaaacgaagcggtcattaccaaacatttgccataactgatcccgttgggattggttagggtacaagcgaagtttgatccctttaatgaccttgttcattctagttccacctcctttttccgttgatcatcaatgtacttggcaacggcttgttcattaacggccccaatactttcaacatagtaactgggcgaccacaagtgacggccctcctttttccaatagcttcgctgtaattccggacattcccgaaatagctgataggcagtaccgcctttcagccaacgaacaatattcgtcaccgataatttgggtggtgcactcactaacaagtgcacatggtcgtccttcccaatttccatgtgggcaatttcaaagccatatttagcggcgatctcatggataatccgtttgaaggcgatctcgacccgaccggtaaggactttgtttcggtatttggttccccaaataatgtggtaattaaggttgtagaccgatgttcggccatatgtaagtctgtttgtatctttcataccaacgattataccataattcacgtttcccatatacgcccgtcgggcgtaaaaaaggggggcaattcatcacgtccttaaaagaacgtgtttccttgccccttttcaaaaaagttgccggaattattatagaaagacaattagatcttaatggaattgattttcttattattggtataggtataaatttgataacagctgtttttcctaatgaattaatggagagtgctacttcgattgccagtactatcgatatcgatttcgacaaattaagtgcggatttagtagctacagtttttttagtagtttctaactatagaacaaaaaagtttttagatagttatagaaaacacttaattttaacaggaaagaaagttaaagtaaggctaaataataaaactatacaaggaacggttttaggagttagtgataacggaggcttagtattaaagtcagaaaacaataaaattcaaacgttaatgagtggtgatgtaataaaagttatatattgataaaatatggacctttagctcaatgggtcagagcaaacggctcataaccgttcggttataggttcgagtcctataaggtccattcttatataaattgtctagaactttttggctatcagcaaaaaaagttaatacaaaaagagctaactttattcaattacttatttttcttcccaaatatatcaagccagaggtgataagctcgcttttcatcacttgaaagtgagtttatcactcggtcgatggcctgatcgacagtttcgttctgagtagagatactcagtgcgttttctaacgcgttaattttcaatactgtttgcttttgcaaccgtaccgtctggtaggacttacgcccgctcttgggcgacctactgggcgttttttggttgtcgttgcagtgctgctggtcgacttgcttgcggcctcttccagttgctgacttaccttactagggtcatagctttcttttggtttagcaatatccgtcttaacaatcggacggggaactttctgttctttcttcttagtgcttttgtcaaattgaaactttgccattattgattctccttaatacgttccacaatttcgctagtgagctggttataaatatagtggaaccgactatcatgcatatcgtatttgataagattcttttcggcgattccagtccggtcgtagcgcttcaaacggataacttggtcaaacagcatatccttgccaaagtcctcttccgcgtccttaataatctggttgtccagtccagcgttatttttcagtaagacagcaagcacgccgagaatatcaaagttaatttcagcgtaatcattgtacatttgctggaggtactcaaagaatgtttcagcgccatccagtgacctttgctgcttttgcaacacgataatgatgccatcgttggtgtagatagcggaatcagtaaagatggaaagtgttggtggcacatccaggataatgaagtcataatcagcgtttacttttgcaagctgcttggtaaagtatgaaatccggagctccttaatccggtccatttcggcttgtagggaacggctgttgctaatatcaacgttccccttgtctagcatatacttcatttccaaatagtcaggataatttttgaagtcctcagaggaggacagtaagtagagattatccataatctgggtaatcgcagacgggatattctcctcagtcagcgcgaccatcattgttttgttgattttaagctccttgctgttttgtaagccatatgtccgacttagtagttgagtggcatttgcttgtggatctaaatcgcaaacaagggtcttataaccttgccgcgcaagctgataggcagtcatgacggagttcgtcgtcttaccgactccgcctttcatattgcccaacgtactcatgtagtagcttggtgaccatagatggccaccccagtattgggattgtttgatttctggatgtctcttgaggaagataaaagcatttcgacctttgagggccttaatggcgctgcttggcactttactgggtggacaactaatcagtacatgtacgcggtcgggcataacttccattttctcaattacaatgtcattatcatcagccaccgagtgtagtatcgacttcattttatttgatgactgttcagtcacgaaggtctgattacggtaaagtcattaatttagctactgcagccgcatgtgcgtcttccgttggcaaatccatgtctctagctgccttttagtacacattgaaagtctcctcatatcggatgagccactccctgcggtcggtctcattttactgatatgagaagccttttcatgagagtggtcgcctgttcagggggcagggagtgggagcatatataaagaaaaaccacctagctaaaaagctaagtggtcgaaatagtcgctaaaccatgctataatattaccagtacgaatgatgaatattatattcaacaattaggctgatagtttagctggttgcgctcttgttctggtgtactgcaatacaccaccagccaagcgcattagagtacaccctcaaggatatcagcccctaaatcttacttgtgcattggtggcagccagtgcacctttttattatatcattttatggctggttatactagctatattcttacagccacaagggatttcgagctttgttgtttagccgcaatcaatttggtcaagcagtttctctcggctaacttgatccaatccaagatatttcagtgtcattgcttcgctagagtgattgagcagtgacattactaagccgatattgtagtttgattgcgtgtaaactcgatatgctccggttttacgcatggtgtgggtaccaagatagttgatgccaagtaagtcgcctgttttggccataatcttatagaattgtttttcagtgatatgttggtcttgatgagtgattgacgggaaaagccactcagattgtatattattgttctgaagccacgcataataatccagtaaatcctgtttaaccggttttaagtataaaatattgggtttattagtctttttatcgcgaatgtacgcgtttttcttgatagttccatcgtcatcaaagatttcatttcgtctgagagctaatacatcactcactcgaagcaatgttgccttaccgatttggaaaatagtgtagtttcggcggccatagcggaaattattgagtaaagtgttctggacttcatggagaatgttggtatctttgatgggtagaacgtgttgtttcatagtgattgccctttctggtgttcgtattataatataagtataagagatggttgatgaaattgttcatgggtttcaccaacacaaaagcccctcggtaatccgccataattaccaaggggctttaattgtgggttaagctgtcactacttgcctatcgcttgcgatggtttaaccaatacgccacgcaaacgggaattaccgctaatgataattgtgctaggtaattcaaaagaggattagaaataatgtgttacaataattacagaataagaataagtagcagtgcatgctagcgaaattaaccacttcgcaccagctggtccaggagcaccttaactaggtgctcttttttattatataaataacttttcagattttattactagttgtatgattaataacagttaaataaagaaattgaggaattataatgaaagcatttcgtgaagcaatgagttggattattcccattttaatcgggttaataatcgcattagtaattaagcagttcttctttcaaattgttcgggttgatggaccatccatgcaaccaaacttacaaaataatgaacgagtattttgtttgaaaactgccaagatccatcatggaagtgtcgttgtatttgatgctaatggcgttgatccgcaagtatcagttaaaaccgattatgttaagcgagtaattggccttcctggtgatactgttagctctaagaatggaaatatttatgttaacggtaaaaagattaatcaagactacattagcaagagtcaacgaacaaccggaactggaaactggacattgcgtagtatttcagttcagaatagttggctaaaaaataatggtgccacaaaagttccgaagggtgaatactttgttcttggggaccaccggagcgtctcaaatgatggtcgttactggggatttgtacctaagagtaagattgaaggggttgtaaaagttccatcatggactggaacaaagacgactcgcgaaaatattaataaagaatggcaacacttctatgataaataatatttagtaggtagactttaatctaccagtaataactgcccaagtcttttagttaaggcaatttaaattaatagcttaaattttgatcattcatttacgagcatatcgtatttgaatgattttttgtttccggaagcttcaacttattaattgctaagtagcgaaatagttatatctggggatgttttcgagggtcaggaagggtggaatttagatcacttaaaaatgcactatgtagcttttatataacttttatgtagcttagttatttacaataactaaaattcaatatatacttacagtgtaaacaaaaaaagcacatcacaatttgtgatgtactttattagctaaggctgttcatcgtaccttgctatgctttgtttagtgtttgttcttggtcctgctgcaacaggacttttttagtttaaatgacaaatgattgcaacgatagtcatacaaagaattgcaaatccaatgagaccaattaaagcaagctggactagttgtgataatccgtgcattgcttctacaatctttgccaatccgcttaaaggattgaacaatggtatgctcctttttaatctcgaagcataccttactaaaaaagtataactccggcatagaaccacctcactttctgattcattcaaagtgaacatagcaaggtgttaagccttagcatactttaagtatacttattagttatttaaattacaatagttatccacaggctgaccaatttttatcaaaacatcacaaattgattctgctaaaataaatacataatgataaagatgccggcgtgcaaaatggattcagttcgttacttaatccgtaccggtaagcagggtgccttaatcggcatcctgtttttgttacaataaaatgataaaagagattagctatagtaaaatctaatctcttctaataagtgaattatattttctaaagtgcaacaattttgcaacaaaattggatctatctgttgttttttatgaactttagtctaagttgcgcaacttacatataaggctaaagcgctaagcaatgggggctaggagaaccaacctactatatgataaataatatttagtaggtagactttaatctaccagtaataactgcccaagttttttagttaaggcattttaaattaatagcttaaatttttgatcattcatttacgagtatatcgtatttgaatgatttttttgtttccggaagcttcaacttattaattactaagtagcgaaatagttatatctggggatgttttcgggcgtcaggaagggtggaatttagatcacttaaaaatgcactataggaaaaattatctgctatctgatgactagttatttcaagctcattattccagtaagggaggcctaatacctgtggaattgaatacattccctttggccacctatctaatagctgtgaaataagagatagagggagttcgtcaagctgtagttgggaaatgaattcggcaacattttgttcatgtattgctatatttagggaatcgacttttcgcggttgtttatccatccactggttaagttgaaagtttatgtttctctggggatgagtaattaaactttgcaaactactatgttccagatctttaaaatgagtgtatatagtttttgcgtattgaacagttaaccatcttagttcacataataattgatagttattatctagggaccacaatggttgtaaaagaacaggttgtcggaaagtataataatcattccaatcaatcatatgcttgtaaaggtttaatgtaactgcagtcatttgacgctcacgatgtgggtaaacaataaaaggataaccatatttgtcgctgctatgagctaaataggtaagattatatgtttgcataatggtattaagctcatgttcatggccaaatagaatcggttgatcgtaataaacgtttgctgctggataaaagaagtgaagatatccccaaatttcctgttggttgatacacttcggtggtaaataacgggggaggcctttaccttgcttattaacaagagacgtattaaacatccccaatggactgctaaaaatatcaggatcgttaagtgctgctttaagcattttgcctggaacaaaattaacttgccattcagaatgattattaaagtactggcagaaatcatccagtgtcttagtgtaatcaaataagtaattgctaccaagcaagaattcagctacatcaaggtatgcttcactcactcctgttaaacgcacttgtaaattagatgcgtgttggtataaatcagatagataaattctttgtccatcaattgttacataagtttgcataattcgattagcgatgtttgataatttgcgtccaacgttattaaactccttaacttttgtagttcgaagtgatccatcggttacggcaattaccatttcaatttccttatcaggattttgtaaagcatattcaatgtagttacgaacctttgatgcttgtcgatcgttagtctctgttcgattatctaattcgataaatagttcatgtctccggtcgtgtctattaaaacttaccatcatatctgcaataaaaggcattgcatcatgttgagcaaacttattggcaaattggcgattaaaactccggaaatcaaaatcctccaaggagaaagtagggttgcttattaggtcgatagccttatagaaatgtccaatgaaattatcagagaagcgcttgggttcagaacgatcaaataatgagtgtggctgttgatctacataattaattcgtgatcgataggaaacggattgatgttgctggtagttagctaatcgcaatagtacctcaatatgagcattagttaatgtaaattgagagaattgcttatcttttagcaaagcttgagatagatcactgccaaccggaaacgagtgggggaaagtagagtccaaaactattgtttctttctctttgggcttatttagtgctgattgagaattacttaaaggtattttctcgatattagagatggccggccaccggacggcccaggatttataatagtaatttgctatagtttgatggtcatcggctaccagaagcttattaacatggtcaggcaccgcctgaccttttaatttaccctttctaaggtagaagcgaggatatttaccccacgctctgtggtaacctcccccataattagaggtattattaggggatgataatgatatttggcgaattttagtgatattcccgggtaatttgcgcaagaaaagaggggaagttatccactcataggagtttttaaccggtattttaacataagtatcggctttttttaggtcgatttcatgcttattatcattgctaaatcctttaatatcaatgcttttagacctcttatatagggctgaagaacctatgttttggctgtgttgatcttgttcctttcctgtggagatattgcgggaattatgtgctaacaccccgttgctttggaggtaactagtctttttcggcgttttattattatcagatggaggtaaagacattgattggtcccgttgattagtaaaataatgactatttgggttaatatttgctcctaaaaatcgagacattacacttttattatctttcttttcatgatcattacttgttttcgattgattggtaaaaaagggacgcgttttatcatcaaaaaacgaggattgattagtagttagtttatcttccatatcttgaattccccagagtttttctaagtttaataaacgttcatcaaatatcttttcagctatcggttcttcagtagacttcttgtcttttttattatgtgtatagttctctccaggcatcctcccaacggttttatccttcttttcagataaaccttcatctttacttagatttgccctagagtgcttctgtaatgcttcattagttacacgatctgatcgactactacgattgccttttaatagtctgcttatctgaccttccctaatcgttgtaataaggtgtttaactgcagatacagaataatgaaaatctgctttagtttggggacgagtagatgaaatcatttgaacatctgttcgcccagtggcttttcttaaatcgtaaggcttttcatccttgtccaagagattcttatcagttcggacgggattttgctccctttggttggctgttgataaaacagaggtcggtagcacggttgagttgtttagtaccctgatcaaagtggtataagcatcccctaacaagctattacatggcagtattttatttacttccaggggatataaccgccagtaatgtctagaccttaactgttgtttttgctcatctctaaatacgtggttgtctcctgttcccacttgctgattaattaaccattctgcatccccaagtaatcctaagagtctgtctaataaaagactattattgtttgtgagaatagggagattagcggtgccggtcatccctgaattattatcattgttacctggatgcggtgaatctttactcgaaacaaaatggctcgctggtagctcactatcaaataaagttcgcggtgcggtatattcggataggctagtctctttggctttacaagaagataaacctaaatccattactcgaattttttcggtagggagattcactaataaatgaatttgtagagaaagtggcaacgcaaataataaagaatcatagatagttatggaaccataacatactgataaaagaagattaagtttggctgttaataacgatataggattaaaattaacggtgttgatgttggatagacgttctttatttttattatcagtgagagtgttaatgtcgttttctctatagctatactgactatgtttagcggggttaatattatttgataattgactattatatggattacctcgtacagataattctggttctgtaccgttaactagtaagtatttatctagctggtttgttaggcttactattccactaccactggtacttgtattaagtaacatttttcgtagactttctaattggtttttatccaacgtaatcgtagaagtctttgctgcctgttttagtggctgggagacatcgttctcccagccttcagccaccggctggatttgttttgtagatgccggggccaccgtgcccggcttcttgttatcagttgtgccagcatcgtctggcacattaagagtattatttacttctatatttccattaaacattggattgctgtaaatagtgtgttggttgtttaaagtcatactactagtcatggtaccaaatgtacggtacttaaaagtagcagcatatagaccttgcacaattacttctattgcttgctcattgtggctattaagactaattacaggactttcacttgcttcctttgtccataaatgttggtccactagaagttgtctaccattcttattcaatatatagacagttcgtaacagactatttgttgtctgttttttagatttacctacttttttcattattccaccataactacaccattcacgtagaatagaacgtgtcaagatggttggataatggctacagatagaccagagcatatctatttggtttatgttagcaaaaccaagatctccaatcatttttagtaacaataagttagatttagtcaaatttataggatgcttatgtcgtttattggagtattggatcatcagactacttccttccatatagtttatttatgtcttaaagtagcactttaatttgagagtttggttaagtactccaaaaacgtgaattatcaatgtttaagtgacacaaagatgaacgaaatagcatcgatataccactttatttttggtgttatatttttgattttgaaaatgtaagacaggaggatgctttttgaaaaaagagataggaaaacaaggatcaactagagctaataaaattctgttacgttattataaggcgacacattatgcgacttaccatgcctatcgaaaaggcttaacaagggcaacgagattgatagaattggcaattttgattttgatgatttcgactatcatttcaataattccggctacaagaggattggccgattatctattatcattgagtggccttattggagttatctattttctagtttattatcggattaatgctaaagggcgttatcttcggaaggactcaaagaaagcaatgagaatgattgcaacagatggctttgtacccaaatcatggaacatttatgatggggtatatagttatgaaggactagagtcgatagaaatagctttcgtgcaggatcatagctatttgaaagatatctggagaatattgaaggataatcgtcctacattaccacctgctaaaagagatttagaagcgttacgtgaatatattcttcgtctacaacaactagagcttcaagatgaactaggtattcaaattaactacattggttatggaacactcgatggaaaattagttaaacaattaaaggaagcacattttaagctagaagaaatagacgatgattttattacaaaaccaggccgtttggattatggagctgctacaggaacaataaaaaacgcctttaggaattatcctaaagactttaaagcgtatatcatatcttttgatttccatacttatctgaaacttcaagatgagaaaaaacatcaggataaattacgtgcacgtcgccgtactcgattaaataaccttgcatcgtctgaggcaaagtagtcaaaatagtaaagacgatgctataataaaagtgtacgtttttatgtgttttaactttttaatagcaagtagtctattttatttcgtttctgttttgctaagtagcattttgaatttttattgtttatgtcgtttttatttaattttttattttagaaaaggatcagctttttgtcttgctggttcttttttattaggattttaatttatgtctaactatttaattaaattatgaggattgaagcagctgcattggtagctgtttttatttttaactggatattggaggaatttattatgagtaatattgaaaaaaaggatattcgttttattgcagtcaattttgatgaccaaaatgttaaggattttatgagtaacaatacaaatgcctttactgaaattgacaaacaaaagtttgatcggtcagttgatggtttaagtactagctatcaaaatatgaacaactatgtttcattaattggacggctagttaatagtcctagaacaattacacaaggtgatcattcttttatatatgctagtttatcggtagaaagtgggtattttgataagaaccataattaccaaaagcatgagtttgttgttccgctacgattaaacatgaagcagaatcgaatcatgcttgctcaagctggagacatgcttcaagttacaggtcgaattattcgcttcatcggacaagatgaacaagatctgcagaaagctacctcttattattatcttgatgttattaattgtggtctattgattggtctttcaaccattcaaaaaaatgtagtatacctcactggaaaactacaaagtgatccagaaattattctcaatcattcacaaagcgatactaaatttgtatcagcaaaaattgtaattccagatggttatcgtgatggtaatggagaattccataagcatactgaagttattatggttaggttttacaatcaaattgatgagataatgactgcaaaacaaggagatacagtgcatcttaccggtaatcttagaagttggggaattgttgacccgcaaaaagatacaatgagggcaacgcagtatttgtatgtaaatgttaaaggatttggaattatgtatggatcgtcaattcgtaaacaggttaaggcaaagttttatcctaaaccaagaccacaaactacaaataatcaaggaactcaagatataactaaaattcttgcaaatttaacgccagctcaaaaagcagcattgtttagtgaattaagtgtgggtaaccaagaaactcaaccggcagagcagcatacatctactactcaagtgacatcaaatgatgattttgcaaatcaaaatcaacaatcaatggtagaacgtgagttggtttctgatcaagagaattatcatacttctattcaatctcacactcctcattcaaaagataatgaacgagagaaatttatagaattaagtgatgaagatttgcgatctgcaatggagaaattggattaaattttttgctaaaaaatagaaaaaacaggatatgacgtacgaaaaaggagggttacgatgccttccttttttgttttctaaaaaattttacattttccacaatattattagtttgaccttattattaaggtaatcgataaaggaaaaaggaagtagggaagatacatgataagcggattagatttttccagcgaaactatcgcttccactgagaaaaaatatattgaacaattttataaaagcgatgatccattgctttcagatagcattagatactacagtatcttgttccttacatttttacagactcatgaggacaaaaaattcagccatcaagatcgtgctaccaagaaagtgatatttgataaagaaatgtctagctttcggacagctatgcgttatgcctttaataaaggccatcagattgcttttagtctcttgcttatgaaacaatcacaagaatttagtcaagatttttttgaatcacctaattcacacgacgactttttgtatacttacgagactatggttaccactgatgtttttaatgatactttgcgaagagatgccattgataatttaattaaatatactcgacgtaattttgaaaatgggtataacgaaattataagtttgggcactcgcttttataaaaaaggaattggcgttggatttgagcaaattcgtaaatatattgttcaacgagattataagattactggatattcaaaaatgctaagtgtgccttataatcagagctttactgtgacgcctgcttttaaagccactttttcattggaacaccaggactatgaagagtgggatctgcattgggatgaaacatatggatttaatgctgctaaaggtatgcttgctaaagcaatgattaatcgtcttaatgtaggagacgttcgctcgtatgcacagaaggatgcctcaacatataagatgattaatcaattttctagtcaggattttcaggacagtgatgtagtttacttaattaggattgattttctagtaacagatacagaaaattttccgcgtttattgcagaacagtgaatacaatgcaataaaactagcattaaagcagacaattcgcagacgattgaaggtagacaacagtcatttatttattactaattaagaaggggagagcttatgaagaaagtattgcttgcaatggatgaaggcattgcttcaaagcttgctccaatgtttgaagaaaattctcagtcactaaaggtaataccgcaatgtgtaccttactgcagaagcattatacagtcattatcgaggtttaaaccggatattttattcttgtctatgaaacgaataaaatacgataccaaggatagtcagcaagaactatttaacactatctataaaattaagactgatcctgaattttctcaggttagaattgctgttcaagctagtttgcccaagaatgatccgtttttaagagaacttgctaagttacaagtagaagatatttttattcctgatggtaatggtggaagcattaatatgctgaacgtcataaaacagttgtctaaacctgcaaacttaaagaatattgaccggtttttggcaataaaagcacctaatttacataaaaatgaaatattaggaaaagaagatcatattcaaaatgataacgaaataaaggtagaatcgcctaaaaagaagaccaaaccaatagaggagaaaaatgaggagaggtcgcctaaaaataaaagacggattaaattagagcgaacagcaaaaacaaatcaatctaagccagtcaaaataattagtaagactaagccgtctcctcaaaaaaaggtatctatcccacgtcctatcaagagtgaacatacatcaaaagtggaagtggaaaaaaattctgttccagaaaagaaaataaaaaaggtacaaaagcctcatataagtcatagtaaaaaaaatctaacccaaaaacatattattgttatttgtatcttattagctgtctgttttgttagtgcttatatttttcatttaagtcgttctgctattaacacacctccatatacctctctaattaaccacggaaaatatgtgcaggctgctacttattatccatctaaagctgtagaagtagaaaacaagatgcttaatgacagcaatgtaaaggataaagcaactaatacaagtgaaattgcagatatttcagatgcagatccaataaaatttgatgatgcttattttaatgggaactttaataaggttgttactatctacgaggattctaataatcagtacttactaaaattgagcaatgcacgtcggacaatgttagcttatagctacatgaaaactggggatgtacaagatgctaaggaagtagcaaaaccgttaaataatcaacaattaaatgacaagatcaatgcctatgagaaatttcaaaaagccaattcaattttgcaagacaaattgaagagcggacaattaaatgattctgatcgtcaaaaagctcaacatgaaattcgaaaaaataaattagcaatgaaacagctataggaaggtatgaaaatgaaaccagttcgtaaagagatactcctaaagagtgaaagcgcaaaagatacagtattaaaagcaaaaaagaaagaatataaacaaccatcagctaatactcataaaccaggacaaaaatcctcgcccaacaaaccaagaagaaaaggaaggtctggagggaaaagaagaaataatcgtcaaaaaataaataaacagcctaatgagcaaaaattctttaccaaaaagagggtaataggaactgcagcaatcgttggagcaattggtgctacaacagtttatatagcagaacaaggccaaaacactacgaagcaaaatttaagcgccacaagtaataataacgatgactcaactttaggatttgggacttcaagtaaaaccaagcgacattcttcagacaatcgtgataagaatgggactaatcctgaaaagaaaaaactcaataatctgcttaatgatactaaaggatcgaaagaaaattctcgtggaaactcgagtgatgagaatgctaaagatagatctgcttccaagattgaagatattttgaatggttcttctaaagttggcggagctatgggaaatacattaaaacaactacttaaagatgctgataaaagtactgcattggcagcagcaattggtaatccggttgatacagctaatggcttgactcaaaatgcagataagggtgttcaacaaacgttatctactcaaaataatgtagaacaggtcaagggatcagaaaagtcggcatcaacccctattagtccgtcaaatacaggtatcataccgacaccaatacagccaagtaatccggctgaaggcataacaacgccaacgcaaccaagcaatccaggtggaggtacaacaacgccaacgcaaccaagcaatccaggtggaggtacaacaacgccaatacaaccaagcaatccaggtggaggtacaacaacaccaactgaaccaagcaatccaggcggaggtacaacaacaccgactgaaccaagcaatccaggcggaggcacaacgacaccgactgaaccaagcaatccaggcggaggtacaacaacaccgactgaaccaagcaatccaggcggaggtacaacaacaccgactgaaccaagcaatccaggcggaggcacaacgacaccgactgaaccaagcaatccaggtggaggtacaacaacaccgactgaaccaagcaatccaggcggaggtacaacgacaccaacacaaccaagcagtccagacggaggtacaacaacaccaacacagcccgaacaacctgacagtagttctactccgggatcaagtgcagagccagttagttcatcaagtagcaaaccaggatcaagcgcggaaccgggtagttcatcaagtagtgaatcagggtccagcgcggaaccgggcagttcatcaagcagtgaatcaggatcaagcgcggaaccgggcagttcatcaagcagcgaaccgggatcaagtgcagagccaggtagttcatcaagcagcgaaccagggtccagcgcggaaccgggtagttcatcaagtagtgaatcagggtccagcgcggaaccgggcagttcatcaagcagtgaatcaggatcaagcgcggaaccgggcagttcatcaagcagtgaatcaggatcaagcgcggaaccgggcagttcatcaagcagcgaaccgggatcaagtgcagagccaggtagttcatcaagcagcgaaccagggtccagcgcggaaccgggtagttcatcaagtagtgaatcagggtccagcgcggaaccgggcagttcatcaagcagtgaatcaggatcaagcgcggaaccgggcagttcatcaagcagtgaatcaggatcaagcgcggaaccgggcagttcatcaagcagcgaaccgggatcaagtgcagagccaggtagttcatcaagcagcgaaccagggtccagcgcggaaccgggtagttcatcaagtagtgaatcagggtccagcgcggaaccgggcagttcatcaagcagtgaatcaggatcaagcgcggaaccgggtagttcatcaagtagtgaatcagaatcaagtgcagaaccgggtagtgatggttcatcaattactccaattatcaaagaggaagctgcccaagcaaccactggcttagggactgatgcaagtaacaatgttccgctagccgaaaatgttgagatttcttacaataaccaaggcccccaaaaagttgactcatttggtacgggatttaatgacgaaggtcaatatgtaataaaggcaaatgttgatcttcaagatggcagttcatttcctttaataaagacagtaactgtgactaaagacgctcttctgcatgatgctgatattaatactgaagtaaagcaaacgttagtatctaagccaataacaattaaaactggtgacacattaagcctgtttgatagttatcaagttacagctgctaatgatgcaaaagttacttcaaatggaaataatggaggtatagttttaaatcaaccggggaaatatcgaattactttcagagtgggatcaactgaattcattaaggatgtaactgttcaggatagtcaaaatattataaacgcatagtatataagaagggctacgataacccttctttttttcaagaaaggtgaatgaatatgtcaactgttatcttggcggaaaagcctgatcaagcacgtgcttacatgaagggactcggtattcaatttaccggaaaggccacaaaaggtgagggggaaacttttttagatgacaagacggttgtagtagctgccgcaggacatctgatagaattaagtgaaccggaacattatgataaagcatacaaggatcgaaataatattgatattttacctttagttccagaacgtttttcataccaattaaaaggggataagaagcaattatttagtcaaattaagaatgcagttaataaagcggatcgcattattgttgcaaccgataaagataatgagggtggagcaattgcctataatattttgagactatgcggtgccctaaaatataagaaaattgttagagcatatccaacagcattagataaggcagctgtaatgcgacaatttaagcatcttgaaccaataaaaaatacttggttacaggctaaagctgcaattgctcgttcaaaatcagattggttaatcggtatgaatgtaagccgtctttatacttataaattaaaagggattggaattaatggcaactatgcagtaggccgatcgatatcaactactttgaatcttatttgccagtggtataaagaaatagaaaatttcaaatcgcaacctatctacgaattaaaaggtaaaacaaaaataggagctgaggaaattttactaaaatctccaattagagttgttggtagcaacgataggaatgctaagattgaatatattgatagagtcaaaaaagcaggaattaataatagccatgttaaagggattgtaaaggcagttgatagtcaacgtaaatataagatgccaccagtcttaatgacaaagggtgacttatataaggaaatgtcgagggtagcaggatggacccaatcaagatcaaaaaagataatgcaactaaattatcaacaagggtatcaaacttatcctaggacggattctggtaagattacgaaatatatgtatgattaccttgctaaaaattttaaggattatttaaatgcaataggaataaagaatccaggtaatccatttatttttcctgaagaaaagttgaagcattatttgacaacagaggaatctgctggggctcatctagcaatcgttccaacggagaaaattatgaccgctgatagtgatgtaagcgaagaccaacgacttatgtatgaagttgtagttaggaagtcacttactttgttagtggtcccatatacctatgtttcaaacaggctaggagtacttgtaaatggtaaattgccattgatgactcaaaatacagtcatgattaattcaggatggaaaggtttactattaccgggaaaaaagaagtccaatacggctgagaaaaaaggaatcgattttagaaatatactaaaaattaatgatgtgattgatgttgtattaattaacgtagctgataaaacatgcccaccaaagcctcttaaatcaattcagatttatgataaaggcggtttaatggagaatgcctataagtatgttgaaaatgaagaatatgctaaagtgcttaaacaagttaaaggattagggacttcagcaactcgtgaccatgcaatggctagtcttgagtcgaagaagtatgtatcagttaataatcgggatataattacggttacccctaatggctggttaataaactggcttttaagtaattcgcaaataagtgatccaattcttactgctaaatgggaagaagcatatatgcgaatagctagtggtgagataagctctcaggaattgattaatacaacggctcaattggtatatgatgaatttgattccgctaataaaaactggaatgcgcaaaagcttcggaaaatttataacgaaaaggcagaaatttttaataaggaacaatcgataggaatatgtccaaagtgtgggaaaccagttatcttcgttaaagatcaaaaaaatgctggaaagtatgacgcatatcgttgttcaaataaaacttgcgattttgttatttattataatttccgtggaaaatcaatatcggcaacaaacatgagtcgaatactagatggaaaagcaacaaataaaattaaacaattagtaacaagaaatggaacgcattatgatgctaaatttaaacttgcctatgataaaaatcatgatcgctattatctagaaatattcaaagaacataaagactaaaaagcctgctcttgaaaaaatagagcagacttttttcgtagttggttctttgcctttgatataatttagctgtagtcaaacgttagtaggtagcttgtaattttcaagctgggcatatgcagcaatgctgcgataatagcttaatgttttttgattacagtgcaatttttccattaattgttgatccgttaaatcagtacgaagaacattggataagcaaaaactcatccataaattcgttggagaaagatccaatcctaatttttcttcatctccgttgatttttctgttaagtgaagtgaatgacttgatacgatggtcctcattcttaaagcgagtatcctgaaaaagatattgctttgaagaaattggaaaatttggatgtttctccaaagcagcgagtaactttgtattattaatttgaggggtaatatctgcccatgtgagagtgaggagattatcacctttatatccgcataagacagcgagaagaagctttatagtttctggtttagcgatctcaataagttcgataagatgattatgccagccaataacatagtgaaaatggcgatcaaacgatagccctttaatgttcattaaaggatagtgatcaattagtttagcctgatatagatatttaaaataagtcttcaagtatgaaatatatttgtttactgttctggttcttaaaccacgctcttctttgagatatacaacaaactgatgaatatcactattacgcacgttattagctgaacggccatcactatgttgatccgcttgaaatgagaaaaagctactaattgcgaacccaatttgtgagattgtagtatcagaaaataatgctatagttttgcaccaatgttcatagttgtcttgaaaaggatacaaacgctactcctccttttgtaataattattactctaactatataacattttgcggaggtttacataatggaaaatagttgtaattttgttggctttgtaaaacggatgtcagatttaaaagagagcaaaagcaataatcattatttgaaatttacattagataatcctgtaaggaattaccataactatattccagtagttgcttttcgatctattgctgaagaatttgataaagaaatttcagaaggagattttatcgctgtaaatacttcgttgaatatcaataactatgatgggcaaactaggtattcatttactttgagtgattttcatgttattgatgtttcttcacaggcctctaatactactgatgaggttaagagggaaaatatcaacgaggagcaaaaacaagaaaaaggagagaatgtttctacagaaaccaacaaaaataatgaacaacatcggataatttcatctgatgacttaaaacgtgcttatgaagacacaattggtaatgaaaaaaaggtggtggggcaagctaaagaagagaaaactgaaacgaaaagcatgataagttcgtcaacaactactccagcaaaccggtctactttagctggacagtctagtgatgaaactgataatggatcatctttctttggtaatagtaatggggagaatgatccaaatgatttctttaataattttgataaacaaaactaactagttttatttttgggcgaaatccaattaaacagggggaaagtaaaaatgcaatccgctaacatcgtagctgcggagtttaatgtctccgtaaagaaattgcgacgtattttaaaaaatgcattagaactagagatagtttctgacaaagtaagctcaacggatttgattaatacgatagagcaccttaataacgagaatagtatttatccaattagtgacgctatcaaagaagttttaatagatcaatataatgaattacaaaacctggtttcacttagagaagtagctcgtgaacactatgtgaaagagagggcgataatttcttttattaaaggaacgctcggaggtatgaagaaggctctagtagctggatactttcagtataatattttcttaaaaagtggggaaccagaagttaatcgtcacaatgctgataaactgatgaatgttttctttactgatctagcaggaaggtccaggcttaccaaaagctttcaaaaggttaatggtaagatgatgagctttaatttactggaagaagtgaaagatgaacactcatcaagaggacatattataggatttgctaaggatattaaccaacgaataacgccaattgtagcgtatagtaaaaagaatgtaattgtctttatgcctaagatcaataaggttaagggaaatgaatttttaagtccttcgcaaatattagatgaaaaccgaccgccaattgaattcatgatcaatttaagtgaaattcaaggaggcatttctaaaattgaaaactcagctttaaatgtattaatacacgctttaaataatcgtccattctctattaactcattaagacaaagagataatctgatatttatcattactactaattctttccgattaaatctagatgaatactatcctcaacaagacgaacttaaacaagatcaacgagtaaaaagagatttatttggagaaatttctggagctcagatggttgagtttttaaatgcacatctaaaatctcacgctagtatctcttgttctaagatgaatgatagtctcgtatctgttaaaagtcagttagaaaaagttacactttttgttgaccgtgatataaaaaaagagctaatcaatgaagccattgctaatcatgttactatctctatgatgatgaatcagtggctttcagttttaaaagttattcttaataaaaatgactatttgggagcatatcaacaagtattagaaattagcaaacagctcaacgaaaaagaagataatgaccgggaaaagcgaggtgcatagatatgaaaacaataacttatgcgcagcttcgtaccggacttatgaatatcgataatgttgcactttcagggagaagggctgatacccttatcgctacacagctgagacctattaatgctaatagtgaaagtaatcatcacaaatatctttataatgtagaagattataagagaactcgtagtcggctttcgtatataagtaataattatgctccaatagctaaaattgcaaaacgtcttggctttagtcgtactactattcgcaggattattaatacctatccaggtaaaataaagtgcgttcagccaccatttgttgcttataaaagttataacattaaggccgttaaaagatatattggtatcagagaaatagctattttgcaacatgatggtaatatctatgttccaatgctcaaggtacgtcttggtgaaaaaattggctatcttattaacagtgaaaaaaataagcgctataaaaataagcactataaatggatagttgtattcaaagatgaaaaacgaatgagtttatcgcagttctgtgaacaggatggacagtttataacaagatcatcacagcgtttggggacatttactcgtcatggtgttgccacacgtaaggaattccagtttgagagcttcttacataagaaacaaatggagaatttcattgactttttaatccagtgggttccaaagaactgctatacaatccaggtctatgatactgaaaagattaaagttaatatttcaattcgtgagtctagttttgtacttagtactaatgtggttccttataacgaaatttcagcttttatccgtgtctttaacaggctttttaaagcgcatgaatgcatggcctccatgcagattatacctaatgacaataaagtaaaagactataaaattacctttcggaataagcaaaagatgatatatctaactctgaattctaaggcacacgaattttataagaaagaggctatgcttcacggagaaacattgaacaactatattgctaagtttctcgaggaagaatttaaaaatggaaagagagaccatatctaaaatatggtaaaatataattgtaaatattatttacaattatatttctgacttttgttaagttacgtttcgttttttaatgcttgttgcattgctacttttgtttttttgaagcatatctaaaatttaaataaattaactaaggacttactagttaaagctaggggtccttttttctttttggagggatgcaaagaagttatttgctttttatttgtcatgaaattaggtagaaaggaagttatttatatggataaggaattagtacaagctactcaagaacttgttgattatgcttggaatcaagatctatcaggaatcaatgttgggttatatttaaatgagcaacatgagtactgcatttatactgattcagatgcagctcaaaatggtttaaatactgcggatgctttaataattattaaaggaggtattgctcaggtagatttggtgcaattcactttgatacagctatgtcaaaaactacaaagaaaccaactagcttatttgtataatactttgattagcaacaaagtaatcatgccaggtacaccagctaatgctatcaaagttactccaccagttgaggccttcatagctgcactatttccacaagtattagatgatttttataatcaggttgtaaaacatgctcaattaaaaaaggtatgcgaaactattaataaagatttagttcatgaataggagtaataaattatgggagtagataataaaagaacgttaaataaatgggttgtacgattggcttatgtaatgcagttagataggcaaagtagactgatgactaaagcattattcgatgaaaaccatttagacgtcgatctcgatctcactagcattaacgtttcttttgataataaggttaagctcgctatttacgagtggtttaatggcttgccagaagatttgcttgaagtacatggtataaaaagaacttcagctgactttgaacgtctttatcaatttccattagaaaaataccttcttatggatgaagaacagctaagtcattatagatggtaaattttctaaagcttattagaagagtccttcctcgggagggcttttttatttttaaacggaattctaatttgctagtcattatcaatattttgaaaattttagtaatcctctttttacagatatttcagtcatactaaaaatgaaaaaatttaggaggaaaactatggattcacttgtaccaaaatatactaaccaaactttgagaattagcaatgatcttatgaagataagtgaacttttaccagtcgagtgtggtcacgaaccagtaaccctgattgaaggaatttattgtatttgtgactccatcaattacggggatgttgatgatagttctagtgaccaatatatgcaattaattgatgatgtggccattaatcttaaaggattaccgctttattaccatatacagttattacgtcagtttaccaataattattttgaaaatatattaaagattcaaccgaagcgaagaaatcttcgtatcgttgaacgagttactaccgatatgattaatgaaagtaaacaagtactacagaatacgaagaaatgtttgtcaccatttgaattgttatatctatatgctgattcaattattgacaataaaataacggctagtccacatcaatatgatgatttcatggagattaaagatcatattgcaacacaaaaagatgtagttcttactttccttgataaatatgaaaagttgtatggagatgcgttaaaaaaagaggcacaaaagtatgctaaagcataggcctctaaagattatagtaatttgttgtctactgttatttatcacggtgttatcagggtgtgctcatcaggatgtattaacaaaaaaggagcttaacaatagctttaatcagagtacagactatcttctggaaacgcgaggaatggttgccaaacagttaaaagatcctacagtgaaaaaagtaacagtaaccactaatcaaaaaaagtatattgagcattatcagcaacaagttcgtaagcaacaagagataattagaaattcaaggtatttaagtaactatccaagaagtgtgtatcagtacaataaacaagttgtggcctacttaatagctgttaaaaatgaacaaagtcctcaaaacattaatagaaattttcatagtgtcactaagataggtacctttattgttgttaattacctaagttcaaggcctacaaataattaccgattagtaatggctattgatgactattcacgtacaaatattgatcaccaacgttccactgctaaacagaaaaaaactacacaatatcaacagcgattgttagttcaagcaaatattatgcttggaatttttgctgtaattttgattattttgatctatatccaaccaagtcatcaaacagacacacttgaagcactaacagatgtgcgcaactcaagatccttatttgatcgtcctaagccacaaggagcgaaccttgctgtaaattggtcaacgaaagtctttctgataattattgttgttttaattttagtaactaattatatgctggggaggtaacaatggattacttaagaacagtatttaatcaacttagaaaagtacagtgggcccgcataaaagtggctgcgcttgatactgttttgtgcatcatagcaatattaatgattgcagctattttttatgggatagatatgggtgtaaatgagtttgcgcaaaaaagaatgtaggaaatggggactagataatgaaagaaaatctagatgttcatagtgagcattacttctacaaaaaaatccttagaaaaattaatcagaaaagtgagcattaccggcatctttctgatcggcaattacaggcaagaacaaaactctttaagaagatgctgaataatgggaagcagcttaaagatatcttggttgaagcatttgcgactgttcgtgaagcggatcggagagtattaaaaatgtatccgtttgatgaacaagtcctgggtgcattagttcttaatgcaggtaatttggctgagatgaaaacaggagagggaaaaactctaacggaaactatgccggtatatttaaatgcgttgaccggtaaaggggttcatgtagttactgttaataattacttagcacagcgtgatgctaatcaaatgggacaggtattcaagtggctggggctttcagttggttataactcaggtgacttaaattttgataagaagaaagaagcttacgcagctgatataacgtatagcactaacagtgaattggcttttgactacttacgagataatatggcgttgacaaatagccaacaattacaacgaggattgaattacgccattattgatgaaatagactcaattctcattgatgaagctcgaacacctttaattatttctggagaaagtgaatcatatccagaaatttacttgagtgctgatagatttgctaagggactaacagaaaaagattatcaaatagataaagaaacaaaaactgtatctttaacacacaaaggagtagaaaaagcaaatcattactttggcattaataatctttttagtccagataatttggtacttactcactatgtgaataatgccatgaaggcaaattatactatgaagaaagacatggattatgtagttaaggataatcagcttcttctagtcgatcaatatactggtcgcattatggttgggcgaagatttgctgatggcttgcatcaagctatagaagctaaagaaaacatggaaattcatgaaatagctcatactgatgcaagtattacttatcagaatttctttcggctatatagcaaattagcagggatgactggaacagcatatgaagaaaagcaagaattctatgacacctatcatatgcgagtggttcaaattccaacccataagcctaacaaacgaaaggatcttccattaactctatatcctacattacagactaaggatttagctattctaaagttagttcagaaactaaatacaaaaggacaaccagttctaataggcactgcgtctgttgaggcttcagaacgaatacataagttactaacccaaaactggattagtcataatgtcttaaacgctaaggataatgagaaagaggcattaataatcagtaaagctggccaaaaaggtgcagttactgtggctacaaatatggctggtcgtggtacagatattaaattaggccctggtgtacgggatttaggtggactatacgtagttggtactgaattacacgagtctagtagaattgacaatcaactaagaggacgtgccggtcgacaaggtgatcctggcatttcaaaattctttgcttctttagaagatgatttaattcagcgttatggttcagaacgattaaaaaagattgtaactgtgcaaaatattaaaggttcgggtaagagaaagaaagcggataagcaattgaatagttggttatgtttgcatttagttaaaactacacaaaaaaaggtagaaggaactaactttgagcaacgacgaaatgttcttcgatttgatgatgtattgcgattagaacgtaattctgtgtatggtcagagacaacagattttaactaaccaaattgatcttactaaaacaatagaggggatgctaggacgaactattgaacgtaaagttaatcaatatgctcaaggaaaacgtaattggaaacaaaaagaattaattaatttcattaatggagagcttaacttggattttccagagaataaaacctcaaagcccaaagaaattaagcctttgaagatgtatcttaatagattatgtgtaaccaagctaaactcaatttacaagcaattaattcagacgaagcaaataaatgagtttcaacgggtgatattactaaaatctattgatcaggcttggaaagagaatatggatatgatggaacaattgcgcttgtcagtttctttacgtggttatggacagcataatccattagtcgagtatcagaatattgctcattatcaatataaaaaaatggtggcccaattagaggaaagggtcactaagaatgttttaaatgcagaaattagacaggcaggtgagacccaatgaaaagaagctcgtacaaatatcgtggcttgggtaatatgattagccgttttgcttatactatcttaattctggttatatatcatttattgtgtctcctaactcttcctggtgtgaatatgcaatcttttcagttggcaagtattatacccgcgattaatttgttaagtcttttttctggtggtaacttcgatcgcttatcaattctttctgtgggtttaactgcatttgttaatgcgcaaatagtggtacaaattttacaatcaggtatttcaagtacactaactgaatgggcaaaaggtggtcaacgcggtcatcataaattaaaccagttaactaaaatattgacgtttatttttagcattatacaggcaacagctgtcctatttggggtaaacaatttagcaaatggcgaatttttacttagtgagaacgtatttgtctatataggtctatgcttattactagcggcaggatcttttattactatatggcttgcagatcaaattaccctatatgggcttggaaatggagtttccgtcatcatttcagctaatattattgcccaatatctaacacaaggattaacaagctatccgtatctgaagttggtaatcattattgctgtggttgttttgatgaccttctttatagtctttattaataattcagagcgccaactaaatgtcttttatgcgaaacgggatttttatggtgatcaacagtcatatatgccagttaaacttttaacttctggagtaatgccagtagtatttgctagtggtgtcatgattattccacaaataattttactattctgttcaggacaagaattaaatactttctaccgattaattttgtatcttttttcttggtcttcaccatatggaattgctatgtattcttgcctaatcattggatttagttttctatattcagagattcaacttaacccacatatgttagcagagaaccttcaaaaacaggaagcctttattgagggaatttatccgggaaatgatacagaaaaatacattattaaacttcttaatcgaatgtcatttatttcttgtgtcattctattgatgataactgttttaccaatggttataggtaattattggttacatatacagtttttaggatcgataggatcaagtttgattatcatcgtaagcgttcttgtagagatttttaagcaagctcgtggccttattcagcgtaatgattatccatcatttcttgatgatcatgttgattttacagaataggttaattaagaggagatactgggatgagatttaaggaagcattagtgaagatactattgatgatagttattattttttcgctttttggtatcaaaatggtttacgaatttgcttattcaccatttcaggtagctatgaggagccaagataatctagtggttttctatcggccaaggtgttctcgatgccatcatgttgcactaagagtgctcagcaagaattatttttcgataaaacgtacttattatataaatgctaacagattggataacgaagaattaaagcaagcgaatctgacgattacaccaggttttagataccatggaaaaacaatacagacagtgaagggggatgaaattgatagaattattaatgattcaaagtaagaagtacaaagttactttaactataatgaaaaacaagacaatataaagaaaacaacatataaggttcagttcataactgattagatttataataaatattgtaaatcggacaaaaataaattaattttcaattaattcaaaaaaaccatatttttttcgttttggcatatttggatttgctacactaaagatgatcaagaaaggggaaaagataatcttcaatcttgtgtacttagtttgttaattaatttataaatttagggaggaaacctatcatggaaaagactatgaaaaagaaagctttagttgcaactactgctgtagccggtattactttagtaggagaggttactactgttcatgccgctgacaatgtacaacaaccggtaaacgaacaaaatgttaatcaatcaagccaagaagaaaagcaagctgctcaaaatcttcaaaatgcacaatctgatgttaatactgctacagaagctaattcaaatgcacaagacaatttggcctcagctaataataacttaagtaatgcaaaaaaggcagttagtgatcaagcagctaaagttgctgacgcaactaaagctcaaagtgatgcaagtaccaaagtagataacgataataaggttgttgctgatgctcagcaaaaggcggatcaagcaactcctgctaatattgaaaatgctaagcaagctattgaaggtcaaaataaggttattgaccaagataatgaaaacattaagtatagtaatactgaccaggataaagctcaaaataccttaaataatgcacaatcaaatgaagataaggccaatgcaacattatcaaataagaagagtagtcaagcaagtgcccaaaacaatgttaaacaggctgaagacgcgttaaatggtactcatcttgtagaagcccaaaatgcttttaaccaagctcaaagtaatgttgagaatgcacaaagtaaatatgatcaggctaacaatcaattgagcgatgcacaaaagaaagttactacaaatcaaaatgacctgactgctaagaataaggctttagataacatcaataatcaagtagatacagatcaaaacaatgttaacagtaaccaagcaactgccgatagtgcttcttctgcaacacaagttgctcaaaatgctgttgatcaaaccaagcaaagtctagataaggttattgaggaattaaatggtttttctgaaaacacaattaaagtacctgcaggtgcccaagaggcttacgaagcatttattgatgcagttgataacaatgccgatcagtctcaattagatagccttgctaagaagatgtatgatactcttcaccaaggtcaaggtacgaatgggatcaatcattttaatagtagtaagtatgatcaaaatcaattggttgatgtcgatcatcttacaacagatcaattaaatgaactaactcaatttgcagctgatatgatcaattcagcacgtaaggcatggggaagcgacaaaaatgctgggactcttattccaacacaaggtgtttcagaaatggctcaacaaatcgctaaaggttacgttagtgataattggcatattagtcaaggtcatgatgttaaacgtgttactgcagctgcaggactaatcgggctaaacgatgcaggtcaattctatgaagatgcaagtgaaggatatgttcatgcatggccatgggaaaaagatagttataccatggataatttaaaggaagcagtatatgattctattcttggaatgctatttgcagatgataatagtggtaatggccatatgactgatttgcttgggttacatgtaaatagaaaagaagatcaccaatacttcggtttaagtacaaatatgtgtccaggttcttacatgggtcaactacactttatcattgttgaaaatgatccggcatatattaaagatccccaaacctttaatgctaaaggaggaacaaccaagattgaatacattgacccgaaagttcaattaaatcaacaaaaagatatactaactactactttgagtactcaacaggctgatttggcaactaagcaagacgctttaaataaagcaaatcaaaatcttgcaaatgcgaaaaagcagttgagcgaagaccaggatcttcaaactgtagctcaacaaaaccgtgactcagctcaaaaagcattaaatgatgcaactgccaaggtaagtaatttacaagcaactgttaatagtttgagtcaagatctaaatagtgctaaagcaactcttgaccaagcaaagaagacgcttgagtcttacaccgctgatcacaaggctaagctagacaattacaacaacgccaaagctgcacttgatgatgctaataaagctgtagctgaagcacaaagcgctgttgatactgctgttaatgaaactaaaattgctcaaaataatttagaccaaaagaaacaagctgttactgatgctcaaaataaattagctaatgatcaagagtatcttgccactttgaagcagaatcttgctgatttacaaaatgcgcctcaaaacttacaaaaggctaaggaccagttagcaaaagatcaaattgcactagataatgctaataaagaccttcaaaaccagaaggatagtctagatgagcttaataagaaacttgaagatgctcaagtaaaggttaatgaggcgcaatctgcagctaacgtcactaaagcaactcttgaccaagcacaagctaagcttagtgatgctgaagcaacctggaaggagttacacaatgatgctcatcgttatgggaatgtcgttaaagtaactccaatcacaatggaagctggtactagtcttcctgatccagttattgaaaatggttttaccgttaatactggcactaatcaactatttgtctcattagctgctattgattcatctaataataatattccacaagggacaaaagcttcatgggctaaccgttctaaagcattgacagattcacagaatgctggtagctactctgaagacattttaattactttcccagataactctactgtaacagtaccagttgacttaactgttactgctaagaagattacagaagatcaaaaagcaacagaaggcggttatcatattgttaatggatctgttgtagataagcagaataacttggttagtggttggactgttaagaatggtcaaatggttgatcctgaaggtaacgttatcaaaacaacaatgtctacagcccaaggtgttactattgaaaaaaataatagcaagtccgggaatacaaagacaaacatgattcaaacttctttaactattgctaacaacaaggcaacaacaaacaaagacaaccagttaccacaaactggcaattacaacaacaatacaaaggtattaggattagctggtattgcacttgcatctgctttaactatgtttggatacaagaagcgccaacataactaattttcttacttgatgggtttctaaataaaaaatggactacttcagctcaaggtagcccatttttattattatagtgaagcagttattcttacgtataaccagactaaaatataataaaaatctattatatattaatcaacatctcggtttaatcgttaaaactcctctgagagctaattgttaatattgagttgtatagtaaatttcggtaaaataaaaaaatgaaatactttccccgaagtatttcaccccgtatcacactaaaatctccaccagactttttagtgaaaaatgtttctttaacctatagacattcttagtatattatgaatgtcttttttattatgttctttacgaacgtatgtacgcacaatgtgctcgttatacgaacgagcgttcgataaaatgtaagatataccgtgttttagatgaagactctggtgcttatattagtaacgtggccggatgtatgcaatcataaaaggaatcgcaggtaatcctgatacattctggatgaatattaaggattatattgagttttttaatccggatcaaattaaagaaatggagtaggctggaaaatatatcaagcaatctgatcgtaggaaagtgaatatagatcagacatcaggtattaacaggcaacttagtaatttctacgagtattatatgggatagagccaatggtgacagaataaacattaaataatgaaaatcaactaatacattaatatggacaataacagtattagtgataattgtgtttagcaactgttttaaatgtgggtgcaatcattaacataattgcaagtctgatcgtgacgaaagaaataatgagagtatttaacaagggggcaaaaaaattatattctggggctacgtcggggtaggtgcctgtttagcatcagtccttataaatatgatttcactagctttctaaattttgcattataaaactgaacttttataaaatgggagagagtccccaccaaaactacggttggtctttttgtattgtctaattgattttataataacagtaaatattccttactcaccgtatgaggatgccagattactatgttatgattagctgattatagttgaatattggcgtaaaatgtaacaatgatgatattatatcttccaatttgaaaggagtaataggcatggtacaagttgacgattcaaaatggacatatctactgcaaagattacacgaacaaagtcataagcagcgtgaaagctttgtgattaacttcatactcatgaatttattatcagacggatatacagatgttaatccagttttacaacaacctataaagcaagatcattcaagtgggaagcgcgaagcaattgacctttatttcccacaaatcaacttgggcattgaaattgatgaggaccaacattttaacgatgagaaccgtatagaagataagaaacgaacgcgcagaattaaagataaattgaacccagttgatattggtagttcttcatacactgaaaagagaataaatgtgcaaaagagcagaagtttgaatgatgtaattactgaatcccgacaagtagttcaattggttgaatttatgatcaacaatgcacgtcgaaacgataattatgagccgtggcttaccatggaagagaggcaagaaaaattcaataagcgtcctgtttatcgtccaggtatgaatattatgtggcgcactcataagctggcaacaaaatcctttgtaaatgctggttggaaatttgcgcttggtcagagtggtttagcaaatatctatagtgacgaaacaaaaactcaaaaaatagcgtcattttggtttccaatcatcaagactaaagaggaagcgattaaggataagagttcttggtttaatgaaattaaagcagaccgccgtgagatcattgaatattatattggcgacaaagtagatatatatgaaccggatttattgccccgaattacttttaagaagggatatgattactatactaattaccacggtaatcagtatttaggcgtctataagtatgatccttcaaagtccacactaaaggaaagacattatgtgctggaaaaagataagtcggtaattaacctaatagaagcaatcaaagaagaaaaaaagagagctacaaagaagaaacaaaagaacaaatagttcatttgagcttcttaaatacaaggccccttctgctattggtactagcaaaagaggtcttgtatttatataaaaaggctccgtatccatgtgtgatgtgggacccaatgccattcgtatcccgtacagggaaggattaatgaaactcatcgagatctaaatcctgctataaagccattaatacctcaacaaaatcgtcatacttgaagttggggaagggggagttgtacaacacaattgtgatattatatttttcacttagatcagtgatagaagcccaaagattgagctttccgtttgagtgcggctagaagtcagcaataatatcatcgacgcgtttaattgctagtctaacattacaagtttgatttttcataaccaatccttatttaacaaagaaacacttatgatacaataagaaaacaagcaagttttaagggcgttggccgattcctacgagctttaccattctgataggaagaaatttgtttaaaaaagaggggggagaccatgaataaacaaactgtcactaatctatcaaagttgcccaatatatggacaaagcatacaataaaaccgaaagctttttcagaatttgatttgcattctgacaatcgcggtttcttaaatccaaaatttgaaggcatagattcgggaactttaggaacagcaatcgatcttggcgcaagatatctcattcttaatgacgattgtgcatttgataatgcaaaaattggagcttttaattacgatttaaactccaatattaatcaagcatatttaaagcaatggtatattgagattggtgatacaaaaacggctaatgaactcagcaaacctcttgacaatgcggcttttcactttaatttaaacaaaagcgtgttagaaaacgctagaaaaatacctctaaaaaatctcgagaggttccagtgtgaacctttaattacaatggcgttctttgagtcatgttttagatctagacaagctcttgattatgatattccttttagattagatagaatgtcttttagccgcattagaactatgcttcaacgatgtgctaatttttttaggaaatatggagcgccaacacatacagactatactgttacagcaaataatgtttttggtgatggtgattatttaagcgaaaactatgtagcagatttcaaaacatataagagatcaccactcgataagccttataataggcgtcagattctattatattatgctatcggtaaatacgaacaaaaataccccgaatttcaaactatacgtcaacttattttctttaatccgagaactgataaagtttatagcataaatgtcgatgatatttctccagatctaattaattattatatagaaatcgccaacaatcccatcttagacgaaatgaaaaatcaacaaacatatagttaatcatttacttctctctgagagcttatttttaatgttgagttgcaagaaaaacttcggtaaagtaaagaagtagatatttctccacaaatatctcaccccaatattcatatactaaagttttctccaaaaaaatttagtataaatatgtttttttatagtctttagccatcctaagcattttagaatggcttttctattatcttctttacgaacatatgtacgcatgatatacttataatacaaacgagcgttcgatcaaattgttaaaggatgattgtaatgagtaataagatataccgtgttttggatgaagagtcaggtacttatatcagtaaagtggccggattcatacgatcagaaaaatatacaaaagttgattcagcctatgtctataataaagagcaagcaacgaagatagttaaattaatgaattatatgcgtacccatatgttgaaagaagggaatttaccttcgggtttagaggaaagtcttcgaaatcagactcttgccattattgaggtagaactaaaagacgtaaaactatctttagaagagattgccaaggctcttgaatcagcaaaagcaaagaaaatacccaaagaacaagcttttaggaatgctcaatgggaaagaattcgtcggtatcacgactattttgattatgatattagtacgccaagtcatcaatatatctatatgcgtaattgcttttaggagatgtttctaaatgaaaggaccaattctaaatcctactaaaaaattattacgaagagccaatagaaaaatagaggagatatacaatccacgaaagaaacaagctttattcgtgtttaccactaaccttgacggctatcatcttacctataaaatgagtttagatacttttgccgccttaggaacggcaatctctcctgttatgataagtgaaattcctgctaaagatatagatagcaaagaatatattttatttctcttttctatttataataaatggaacaagttacccatggtttttagagggtatactccagaccaggttaaatggtttatgaagaaattcggaaatagaatatataatgagaaatctacagttgactggtggcgtaatacttattaaataatactatgaccaagaatattgaatagggtataatataactagttgctattaaaagtaacgatttatcttcattggagctccaggacatcttcccagtcctggacttctttttataaaacattcattttacaaaaggtctggctaaactatgttataatagtgacatactatttaactccctaattttaaatagtatatttccattattaaataacccaggaatcattttggttcctgggtccctttttatctatatgatataatactagagcaggcaagttttaaggaaggtggccgattcctgactggaggtggttcatatggacttcaccattatgaaaggattatcggcacatgagcgcttaccaagcacttatgttaatgttagcatttgcgacatttattatcgcattgctgacttttattttcacattctgtgcataataaaagaccgtcctcatataactttggcgagttgcaggacgatcttttattagttaatctgtaacatggccaccgtctttttaacgggcctgctttttgtgtatctatattatagcatgaaagaggggaattgagtagttggtaaagatgacactaactattatctttctttttgattccattaatttctaaatgaacaataaaggctagtcctagacacaaaataaaagctaaaatagccaacaaaaagggtataattgatcgttgatggaatggaaaaaagttaaatagcataaaagatttgccatagagtgtgttgaatgtaaaacttttgttagctggtatattattaattaaaagtccagaagcaatccatgaccacatataaataaattggaatacacttgacttgactaatttccagcaattttcctgatctctactattgagccagaaatgccaatcatgtataaaatcaaatatgttctttaaagcagcaagtcccataacaaatgaaaatacggcaagtgcagctttgtgattactcccattcattgcaagtaaacctaaataataaaatccatatgtgaataaccattcgttaatagaatacaacgtaaccaagctaaatattattgttaataatataattaaaatggtacataatgtatttttattgcttttcaaatcttaatctccttaattgacactgaaagcagaaccatactaattacttcagttcatctttttttgtttggtttgatagaaaatcatcttaggatgatccatccatgatagtaaacgctttacttgactgacttatccaagaagaatcttgagtggggaagttagaaagcctcattttaaccagtcattaaaattcttgttttaatgccactataaacagtgacgccctcttatcatgcgtcttcatcgtcgtcagcaaaaagatttttccttttggaaaatctacatttctaaaaggaaaaactagtgcccattgactccaaaataaactaggcctctcatcatttataagcgactctgagactctgagtatatgaaattgatttagctcggacgttatcttttatttttctttcaaattgtataagtagtgttaaggggattaattcttctgttggtaaattttttgactatttgataattcatgctaaatctagcacatatatcaataagataacgactattgcaactgccagtcctatcgttaattgcaaaatattactcatgctagggatgttgaactacgcccttgttaactgcaaaattattaagaatttcattttcgcttcgcttcatattttggttgtcataatagcaaagactgattgttttatcctttttaaataatgtatcgtagatcgttggatatagcagtttagttttttgactattatagtcacttcgatatcgttggttaccgtgaccatcaacaggaaggcgcatgatatggtgaccataccatttatctttttcattatttggtgatcgctgattcaaaacggttaatgatgtcttttttataagaggaatctgaaacgcattgacgttatatccttgaggtaattgatggcttaggctctggtacaaggtctcaaaaagtgttcctaagttattcttgtcgaatttaatcccaaagaattctctgatatctttggttgaaccatgtaagcgatagttatcaactgtaactagtaactgtggagtcatcgtaccgcctttgataaacattaaatgggctatttcatattgcccatgcttctcatccttatcaaaacgaatgatgatcataatgtagcgctggttcttataggttacaaagcatgggtaaaccattgcctctgcttgtttcatttcttttaccacggttcgtaatatttgaaaatattccactgattgcagtttatttttagtcataacgattgtttcctcctacttaattagttacactttctccaccactacctgctcggtttaggagttgttttactgcttttgctccctggcattttacccaatgtaggcaattaactgcatttgaagttcttgttttccatttcatttactgcagcccaaaccacttacttgatttggtaataatgagcttttttagcattctcctcacttccactcgagtaatcagataaatagtattttaccttgtctaaatcgtagccaagatgaactacaccccgactaaagtcacgggatttctggctaatttatatcagtaaatttctaaaagaactgtgtaacccgtgccacaattgattgagtcttttgtgttggtaagtgaccaataacttcaccgtttgatcttgcgttaatgttcacagctcgtaagtgttgcaaaaggatcgtgccttgcacgttagctaaattaactgattcgaaaaagggtgaattagcatatttgggatcgttgtgatatttagctgaactactaattggaagtacaacagccgtattaaaaaagtgattgtagttttgattgctgataaccacacagggtctcgttttctttatctcagaccctttagccggattcaaattaatccataaaatgtcaccttgcttaatggtcattagtcaaactcctcactttcaatatcagctccccaattaggttcagctgtatcaaagctaccatactttttttcttgggcataagctgtttgccacatattcgaaactggctcagccttaactatgtgtactaacccattagcatcaattagatatctgatcttgtcacctggctctaaagataacgtttctcgcacttgttttggtacagtagtttgattcttagtagttatagtagatactgattcgcgttccataaccgtctccctccttacttttccttacatatatattataacttcatgccacctattaaagcaagtaattgtaagaaaactagttgttgctgatggctaagtaatcattgttcccacttattcccattaatccagttttttgaattttctgccatgaaggcatccccctgcagttagattatggcgattttctactgctccacttcctgatgacgaagcatacaatgagatgaaaaataaaggctttctcaggagaaaggacgtgaatgcgacaaaaattctctaatctttggtaaggcttaattagtattttattgttgatttattgttgaaatcaataaccacatctttaacaattgccgccactacgctattatttaatactttttatttttgatatatcgttgattattaatgaaaagagaagagaaaatttacctccgtatgattagttactgtaaaggaattgaatcgctattgccaatcaagaagtctttcgcatcaccaatataattatatttctttttggctaagctatttattaaatcgttccaattgataaactcatgacgatatcggtcatcaatattatcattaattgtcgcccaggtttgtataaatcttggtgaaaaaatatcataaggcaaataatcatatatacctttattggtatctaacaaaatactacgtaatattctgcctgggttatcccgtccatcgctcctaggttctctcatatcttctaccagattagcatcttcagatacccctaaaagatatgttattaatccgcacattcttaataacgttagagatatgttttttgaaagatttaatatcgtatattttgaaacctttactgagggtaatacgggtgcttgtgcctttttttcagaaagtaacggaccaattttgtcaggaaaaagtaaataaaataaactttgaaattcttttttggttagtagcattttcaaggctctacgaccattatcaagtagtctaaatgcatcattttctatcccatatagctcatttgttccttctgctttacttgtaccagcatcgattaatattacttttatactatttaaatctaacgtaccagccggtgatagaagaatatcctttttagttccttcaaagtgaaccatcacatttttgggattcatatcaccatgagtcgtatttgcctgtaaataatttgtaaaggaaacaaccattgctgctattgtattgattccatattgaacaatgtttttcttcgtttcaaatctatttgagttttcttcatatagttctgcaagctctgttgtccaatcactaaaaagcttgccttccccaagctccataattgtatagagaaatttatgattattaatcataaagtttccagcatcgtaaactcttgcgctatattctctaagcaaattcagagcattctttcttgattccaacaaatccttatcataactatcagaatctaaatatatctttagaatctgtatctgctccaatagtttttgtttaacgccgtttgtaaaattaagttagaaaaatagaaaagccatttgtggtagacttttgaatacccctaaacaaaagaaaggaaaccacaaatgacttacacccatcttaccacaaacgagctgacaatcatcgcccattctttcgtgcaaaagcttaaagcgtaccgagtggcccaaatgatcaaccgtagcgccgaaaccgtttatcgcgtttatcgttacctggaaaccggtgcctcaattgctgattatcaagatcactatatgcgcaataagcaacgttgtggccgaaaacgtactcagttgtcactggctgaactcacttatatcaacgacaaaattgcccaggggtggacgcctgataccattattgggcgcgctgagcgcccaattagttgtaaccagcgaactctttaccggatgtttgaacgggggcagttcggtttggatgtccgtgctttgcccatgcgaggtaagcggcacccgaatggctatattgagcgccgcgggaaggctggccaattggggcgaagtattcacgagcgtgccaaggactttccgcactatgccactgaatttggacaccttgaagctgataccgtccaaggcaaaaagcaccaaggagcggtaatgaccctgaccgaacgccaatcgaaggtcgaaattgtactcaatgtgcacgaaaagacggctgatgcgattaaccaacacttaggtcagtggcttcgtaaattcccgcggcacttcttcaaatcgattacctttgacaacggaaaagaattcgccggctggcgcgagattgccaatcaatttgaccttcacacttactttgccgaggttggtgctcccaatcaacgagggctgaacgaaaacaacaacggtcttttacgccgggacggcttaacaaaacggctaaatttccgcaatcttcccgatgaattggtgacccaactgatgagtaagcgaaataacctgccccgcaaatcactaggctatcgaactccatatgaggtattcatgtcctacgtcactgatgagcaactactttctttctaacttaaattgacatttcgggtaactagaaaagttacaccatttttgccactgcctaaattttttattaccttaagtttgttttttaatcgtgaattaatttctttaatctcacgttttttatataaaattttattactatccaaatctacagagatcttggctttatcaagcttcatcttgcttctccttcatatatcatagatttcactttcatcattggcgattatttcttgtacccttattaccataggattgttttgcttctgatgcaaatcagctattcattgaaactggtaagttatgccattttcatctgaaatttctattctcgcagttttattaaaaaagcactaactcttatcatgaagtgccctagaattgttagacacaaatctatcgattctggagtattttttatgactaaatattcaactaaatttaaggttcaaatagttaaggcatatctagatggagaaggcggattttcttatttggctaagaaatttggcttgtccagttcatataatctaaggaagtgggttgatcttgtaaaagagcaaggatttcaagcgttacaattgtgattgtaactggtattattgcattcactgtttgctatacgcatccgcgtaaataaggtaaacaaaaaaacaccatcctacaagtttagccgactttagatggtgcttagtttctacgtcgtttagagattaagcattgtcaacagtgcttataatctcagaagagtcatgtggcagtatggctctttttgcttatatacgtataatagcttttgaaaaatttattttcaactaaaagtatacactcaatcacatggctgacatataattcatatttgaaactgtagtattcatgctttggatcgtaaccaaattatccgatttaccattatcatcgtgactttcttttagaatctggcatacagcctcccctaagttaccgtccatgatcatatcagtccgaaggtttaataattcttcgtcacgactaaataacaaaatggaaccaggttgtcataatgtttattcccatatttaagtaatagggctagcattaccagttagattactataccccaaaattggcggatcaccagtttattcaaagtatgtcacgaaaggaaaatatgctttaagaccgagttactagtagaatttctgccctgaaagacatcgcagaattaactgaactttcttaagactatgttcaatactttaatcatgtcagaacaacattaaaaacaaaaggcatgactccagtcgaataccgaaatcatgccttatagcagcttaatatttcaattatgtttaactttttcttgcacttcaaagttcttttctttacaaaatgctattttgcaagttgctaaaatttatagagatactaatatctcagttatttaataacaagattaccaactataaccttgtattgtgtttttcctaaatcagcttgacgtgtgtcgctctttttaatatttttaccaactgactcagcttcattaataatatctggattaaagaactcagcatagtctttgatattgagccaaaagacatctggattattagctatctcctttactattgggaatagatcattatctttatcaatagtttgaatgtatttggctatatctgttagctttttagggtcaatcccttgctcttggagtttctgtatagcaacagtttgatttcggttggcactttcaagtaatcgctgtgccgcaatctttgaagtcgagtttatcaatgcaccagcatttttagcgaagaatttgtgctgcttattatagagttgaactcgctgcgcaacaaccttttttgcgccctgttcagcagcgtgaacggctaataaggccttgtctttagacaaacgagaggaattacataagtcgtgagcgatctcattatttacggccctttcagcttcaacgacccctattttcttttgggcattgggatcaataaggattcgttctttaccgagataagcgtcatttacatcatgaaactctacctcaacgactaaaacagaaggctcattaccctccgctgagaaactgtaattagaaattaaaggattaggaaacggcttaagctgattgattttgtagttgtacatccgcttatttgctatttgataagcttgagaatgcttttcagaagaaaaatcagtatagtttagaaactgattatctgtcctatcaagcattgttttaactgcattcttcttcttagcagtaatatcctttagatagtcctcatactgaggtaatacgacattatcgaattcagtatcgtttaagaccccttccatcttgttaccaagtcgcttcatcatctttaactgtgagttgatagactggtaaatagggaatgtatagatgtatatctgatccctcttggatccttcaggaagaggccggtcaatacgcccaattcgctgttccaaagtcatagggttataaggcaagtcgatattcattaaagtaacggcatcttgcaggttttgccctgtcgaaatggtgtcggtacctattaccaagtcgataacggtattgtctttgatgagctcaggacgcttctttgatattggggagaaatgctctaggacatctttcttcgttgatgaattcttatttaacatagctgctgctttgccatcactgatgttagcagcacccgttatcatccccatcggcaacgtaatcttagaagagttgtaatgggaatagatcttatcatagtagtattcgaccgtatcggcgaattgggataccaagataatcttatggctaagtgaacgctccttatcaatgcactcaatgatcttatctaccttctcatcaatattactataggattccttgaggttggagattaattgcttgagagtaacaaggtccttattacagtcggtaatcatcttattgacagcattttgcgctttgcggttggttacactacttatctgtgcttcaagcttttgcaggtaccgtttctttcggataagggatttaacagattggtctgattcattattatctgtgttaacctcgtcctgataaaagtctttgaacaagccaagatcatttctactttcgtactctgtggtatggtatgcaagcctcaggaactctttgtagcgatttagtagttccttgcctttaaggtaggacatcgggtccaaatagatgttcttgagcttctcgagtttgtctacaatatgctgcaaagagtcagcgaatgctttccaacttgagtcggcacgcttcagaagcatcattttcaactgtttagaacccagctcctccttactatcgtcaacatacttaataggatcctggtatgggaatttgaggtccgcgattgtatcgaagttattgctgaagatctcatttttccgcggctcataaggaatatcgacacttgggaagttacgatgtgggaacttggccccctgccctccataggtcttacgagttctttgcagatatatgtcgtcccagaactccttgaaggcttgatcgtccacagctaaacgcttaactaccttattagtaacactattaggagacagcaggaaatattgcttatacttcctgtcattagcaatagcgtccacattcaggaacagtgaacctatattgataacgtcctcacgctggttattccagggggtcgcagttagcattaacccctttaagcgaggattaactttcttcatgtacgaaaccttgcgataagcttctgtgttgttatttttgaagcctaggtgggcctcgtcaattactaataaggtaaacttactgttcgtcaactgagagttagggattcctaccagcttctgacgagaaatgaacgagtagttattagacattacccctaccgcagcaagctcatcatgccactgatcctttaatttggtatcagcaaccaccagtatattgtttatcgcttgagattccagatacagccgtataacgccggcagcagttctcgttttaccaagcccaacgccatcggaaagaactgcagtatcaagggagtcaagcttttccttaacactgacaattccacttcgttggtgttcaaataagttttttacccaatttttactatcgtctaattcagcatatggcttaccgtacatattggcaaagtcataataggtctcttcaacaggcttatattcttgagtaatctttctagcaccatttgcccgaacgactttgattaaatccggtgaaaaatcactcacttcatcatcagatagccatagtgtattgtaccaattatgaagcgcatagaagccatcttgagttaggacatttagttctgtgttaccctgtagcccggcacgagaaaggttggaagaccccactatggcagtgccacgggcggaatttaacgatgcggcaaacagatagctcttagcatgaaaatagttagcatcccccgtataaaccttagcttcaatacgtccttcttcaatccagtgagcaattttgcctaagaattctttatcagagatacccttagcgtcagtatttgccttgtcatagataaattggtcataactttggtaattactcttatccaagacgtttacagtctcaccgttagtctcattacccatcaatattctgaaatggccattacgattatccataaaatcaagaaactcgtcttttaatagtagtaatccactaatatagaaataccctaccgcgacatccagctcgcgatattctggctgcgttaaaaggtacttcaatgcatcagtcatagatactttgcgattatcaataacacgccttgaaaataattgacgctcaattgttgtatcaaccattatttagcaccaccagttaattgatcatatttattcaaaattctctgttcatcagcatcaacgtctttagtatgtttcttagtcttgaatgtttccataagagttattatctcttggcgagtcatcttaaaattaatcattactcgtgcatttaattcagcaataagattctctgatagaatgtccctataagcatttccaggaatagactcgtccaaatcagtataatatcccttattcttctgcaataatgctttaacaatttgaatgataatgtcagcatccttaacgtcatttagctgtggtaatggaagctgcttcaagtagatctgattgatgttaattgatatcaattgccttaacacgaagtcaaaaacatacgaatttaggaaacccaaaaagaataatttttctctgtctttcatcttttgaggatctttctgtatgtttaggctattggttgctactgaatttgctggtaacaatgtagcaattaggcttctcttattagtagaactagcgactgagcgtaatgctatccgagagaaatgataatcatctcctaattttgccttagcattgtcttgattaattctataagctatttttgacgggaaaatttggaattgattcatatatttaccttcatataatggtaaatccgtagaactggcctcttctttattgatgaatttatctgcatcattggttctatggaaatcattccctaatttaataagattggaatctctaagtggcttatatgttagcctgagcttttcaaataaatctaataagtcttgattatgcgcttcaaccattgcataacgttctggttccatttgtttaaggaaagaaatactgtagttcaatttcgagctattattgtttaataagtctaaatctagcttgtagaaaaatgccttaaatttgccatcatcattcttggtatcacggttaaaagttagaacagcgaatttataccgttcatcaacagctgggaaaatttttcgtctatttgcgaaagagagaaattcttgcaaattataatcatctaataccaaatgccttaaacctgttgatccattgtcggtagcaaaattgtcaggtacgagaatgctaaactgggcatttggcttagcaagttgagtaaaacgttccaatgagactttatataaattcaagtctgacgaagctttcttaccatttacaacccagctttgatagtggaaactatcctcagatcgaatatatttagaaccagccttgatacgttcttgaacattactccattttttctcaagtgttgggaactgatcaaacaagattttctccaggtgctttttggctttcttattaggaagcctgcgataacttacatcgtattcagagaaaaactcatctgaatttggcttccaggcctcccaggggggattgccaattacaatatccagccctccatgaacatttaggttgccatcttcgttaaagaagatttcaggcaaagcaaattcaatgcatccgatttctaggaagcttgcatacttggcaacatcccctgcttctggaataactttagctgttaattcatcgcgcaatttaataaatttattaaagtcactcgatttcaacctacgcagtctttcaatatctttttgatacattttgaatactttctcacgcttatagtaaggaacagcattaaataacgtgttctggtgaattagagtacggccgatgagctgcggtaacttagtgtttttaggcttatgttgcaaagaagacagcgtaagagtcaaactggagataattattgctttatagtcaatatcaactccgtaaatcatgtgtttgagaatgtaatcttcccattgatattgactatctttggagccgttcaggaagttatatttatccttaatctcttgaggatagtctaacccggcaagcagttgatactggtcagctaactcaaggaatgcgccacgtaagaatgagcctccaccacaagtaaaatcagcaattttaaggtccaataaatggtcaagggccttagctatttgctcgttttccttgctctcaacggcctttttgacgtcttgatagcggttctgaaactcaattgacacagtttgctttaccatatagtcaacgaaccgctgatctgtatagtaggctcccttattcttttgttctacttcatcatcaccgaagaatacaaccggtttattggttttcttatctaatgtaatttgcacgttttgactcattgagtcttcgtattgcttttcaatggcttccggcggcatatcttcaaacctaaaactatagttacccgccttagtatcaacgtatggcttaacccattccagtttgttttgcttagctaattcttgatcaattttggttgctacctcaccaatactaccggcaaacaagtctccaccgtaagcaagcttgaattgctcactggcctttttactaagctcggtaaggtaatctccgctattttcgttaatttgaacatgtgatgtagcgtctagttcatcaggagtaaaaccattgtcgaagaggcttaactgaccaattggtgttttttggcggttaagcttttttattttagattcctcgcttacattttgtgctatggtaacagccttctctatcgcttcatcgagtgtcccattgcccacacctagggcaatcccatcaacattaaaagagtcagccccataatatccttctaggaagcgacgcattaattgtcgcaatgaaatggtatccaccacagtggacaagactgatttgtaagagtcactttggactagattattaatgtcgtttcgctttatgtaaactttagcttgatcagaaactaaatcatataagtaagttttcagatctgatgccgtaatccattctgacaacttcttgcgatacatggataccattgtaaggaagttagaagaaagctctctacggaatgctttcgcatcaatctttatttgatcttctgagccaaatgggctggattcaacgtagatgttttcatttcttaaataattaaaattgcgcttatataagtcgacgtcaatagtgtctgggtttagatctaatcgtgtatcacgatttccacccaatattgggaaaaacaccaaccgttttttcccaataaagccaacagcagctacggtaaattccaagtttaactggttgtccttaatatcaataacgtgttcgtaaagttttctgacctcaacggttgaggacttctcgtttaagtcttcaaccggtaagacagctataaccccactgtcattgttatcggttttatccgtaaagtagattctaagattactttccggatttatagggtttttcccaactgtataatcaagatagtcagcaagtattttagcagaatattcatcagcattcatactattgattagctgtgcttctctcgtttcattcatttgtcatccttcttccttcctattttaaatgagctcccgtcatcgtaaacctccaaaatctatattatctaggatatgttcacgagactcctggtctaagcccagataattaagtgttactgcttcactagaatgatttagtaacttcattactaaaccgatgttatggttcgactgttcgtagacacgataagcacccgtttttctcattgtgtgagtgcctaagtaattcaaaccaagtaagtcccctactttactcattatctcataatacgtatggcctgaaatgtgcttttcgggatctgcaaaggacggaaacagccaaggactatcataaactttaacgtccggattttgcatttgatatttcattaaccaggtttgataaactagaagatctgattcaacaggacgcaaatataatgtgttctgttttttagttttctgatcaactatgtatgcattcttcataatttgtccgttatcatcaaaaacatctgacttctttaatgaaattacatcacttactcgtaataatgttgccttccctacttgaaagattgtgtaattacgacggccatacttaaaattatctcttagggtttccaaaacttgttgtaaaatctgtgtgtccttgattgggaggactaattgcttcaaaatatcacctctttcccatagactataatctagtatatctctagtatagtctattactgaaaaactgtaaaattaagttgttgatttaacagtatttagcatagactataattacattatagtctatgggacttgtgcgatttatgacaatttacaaaaatgcctctcagacaaaacgaaaatgaattagacgggtaattcatcatcttagtttgtctgagaggcattttataataattagtcaaaaagctactttctagccttatttctagctagatatcaagctgattccaagaagaatatagtttaacccatatgtaaatttcaattattattcctattatgcaaagcaagattgaaggaatgataagatcagcatttctataaatagctattaaattaacagtacaaattaaaatcaaaaaaataaatattgatttccagtgtttcagtaatccgttaatttctttttcggccttagacattttatttatggccataacgaaaagaattgctgtaattatggttgatactgcaaaagcacctgtagctacagcgtaaacatataacattttgttcccctatttctcttttctttaagtgtaacatcttttagcttcatttccccaataaataatatgtaatatattttatattatttattatttatgcttaatctatgtgaactactcggccataaatgaccgagcttctgggaacacgaagtagtatttaggatattacacaagtattcttgctacctaacttacagaactccgttcttttaccaaggctagttcctagccaacggcttttaatcctttttgcaagatgttaactgccgcattaacatctcggtcgtggtgaacgccacactttggacaagtccattcgcgaacttcaagtggcttcttgccactgttaaagccacaatgcgaacagatttgactggtatagtttggtttcaccaagactagttgtttgccataccaagcacacttgtattccagcatcgtccggaactgataccaactagcgttagcgatcgacttcgctaagtggtgattcttttggagattcttggctttcaaatcctcaataacaatcacgtcgtactgcttaactagagccgtcgttagcttgtggaggtaatccttgcgcttgttggcaattcgttgttgataatgggctttaacaagtcgggcgcgttgccagttctgataatcattgagtgctaacttggtatcttggtggttgtgattccattggcgaacggcaacggttgcccggtggcgccgcttgctgaatttactttgccacttcgttacttgatgttctaacaatttagcgttgaaggtaccgtacttgacaccatcagaactaatcgcaaggtcggccaggcctacgtcaagcccgaccatttgccccgttttcggtaaccgttcaacggttgtttcaacttgcagggagaggtagtaacgacccgtcgggtcataactgaccgtataacgcttaattttggcctcaccaataagagtcgttttactcgtgcgtatacttccgagttttggtaattgtaaccgccgcttggcaagtaccttgcacgttgatcggccagtgtaggcctgataggccacatggcggctcttaaagcggggatagccaccttggtgcttaaacaatcgtttaaaggcctcggtaagattatggttcaccactaggaaactggtggaatcactttccttgagaaagggatattcacgcttgagctgtttcaagaggtagttcataccatactcattgacgaagtggctactgggattgttttggtaacgctccttagccatactgagcatttggttccaaacgaagcggtcattaccaaacatttgccataactgatcccgttgggattggttagggtacaagcgaagtttgatccctttaatgaccttgttcattctagttccacctcctttttccgttgatcatcaatgtacttggcaacggcttgttcattaacggccccaatactttcaacatagtaactgggcgaccacaagtgacggccctcctttttccaatagcttcgctgtaattccggacattcccgaaatagctgataggcagtaccgcctttcagccaacgaacaatattcgtcaccgataatttgggtggtgcactcactaacaagtgcacatggtcgtccttcccaatttccatgtgggcaatttcaaagccatatttagcggcgatctcatggataatccgtttgaaggcgatctcgacccgaccggtaaggactttgtttcggtatttggttccccaaataatgtggtaattaaggttgtagaccgatgttcggccatatgtaagtctgtttgtatctttcataccaacgattataccataattcacgtttcccatatacgcccgtcgggcgtaaaaaaggggggcaattcatcacgtccttaaaagaacgtgtttccttgccccttttcataaattaaaagaaggcgctaattattggaccagtttcaaaaaccacggtgaatacttatttcatacagtaccaaccgatgaaaatgggaattacaaactcgctgaagcaaaaaaactaggtaaaacccctgcatctcatggatgtattcggcttagcgttccagatgctttatttattcagcaagttccagcaggaacaccggtagaaattattaaatagttcgcgcatataaaaattcaatttagaaatttgtaaaagggataagccagagaagacttatccctttttattaaacgctgtttgtaaaattaaaccaatttccgtatttttacacatgctgattcattgattctaccatcaatgaatccttttttctttttttcgtaagtcaccgtccccattaaatctttcgatcctatgatactactagattgaagaatacattttaatttaagaatccctttcttacagttaacaagataacctcccttgagagagttaaaggtagctattttgacgtaagaatcgtcttttacaataaaataatttaacatttcgttcttattattaactgtcacactaaaaatttttaccactttagttttcttaggaaaatatagaataagatcagtactttggggttcatacaattttgtactactaacagtaacttcatattggttcattactaacgttcttcctttctaataagctaactagtgtgcaaaattactagttaaataaatggacagttaaaaaatttagttccacttttaaaggtactccatgactgatataccaggggattttcttcactagtaccatccatgagattgccaaaatgattgtgcattgctccatgatccataacgtccagcaacatattgatctgcgacttgctcttggtgtgcaggagaataatcaccacccagatatgatgaagataattgatatttacctacatattggccatttcgagcattgtaatttccgcctgattcacgcgatgcaatccatgccttagctgcagcttcgttgcctgtggcatttgaagtataagaacttgaaggtgcagcctgctgactcgttgtttgagcctgattattagctgcaggagctgctgattgttgttgagattgaactgattgaccggattgaacagtcgcttgatctgactgattagtcgaattaacttgggtattatcagaagtagattcattaatgcttagtgtttggccaacataaataaggttaccatcattttcaagattgttatccttaacaatttgatcaacagtagtaccattcttttttgcaagtccccaagtagtatctcccttttgaactgttacagttgatgcatcagcctgagtagttgcaaacgcttccgttgtaccagtagccacaactccacctaatagcataagtgcttgtttctttttgatattcattttccttatcattactccttttcttctttgtctaaacatactttataactcatttaccatcagtagttatcctattcaaaatatataaaaattgcttttccttgggtgtctttttttgtttcaacatagttaaagtaacttattctttttaactttatggatgttaactagcaaatacatcatcatatatccagttgaattcagaagagttcaaaattgcgtatttgaactccttacggtactcaaaacgtaatacaaaactattcggtaataatataggcattttcttgatagcaagtggaaaacgttgcttatcccctacataaaatgtctgatctagtgtctgatatttaacagcatttacttcctctaagagttttttatcaggcctatgagtaactcgctctgcgtaaacaatacactcgtatttattatcattaactctgctatatagcagatcgaatattgttttcttcatgataaacgtatttccgttatgaccttctgcaataacatccccgactcgtgcactagctatgctttgcggtgccatttcttgtagatatacctcgtttgcacctgttaacttggtcaatttatatttttttatttgtccttcactaccagaaaaaacttcagcttttacaatggaaacatattttttcattaaatctccccctgttttcctgataccaagtttttctttcccgaaatgtcaatttaagttagaaagaaagtagttgctcatcagtgacgtaggacatgaatacctcatatggagttcgatagcctagtgatttgcggggcaggttatttcgcttactcatcagttgggtcaccaattcatcgggaagattgcggaaatttagccgttttgttaagccgtcccggcgtaaaagaccgttgttgttttcgttcagccctcgttgattgggagcaccaacctcggcaaagtaagtgtgaaggtcaaattgattggcaatctcgcgccagccggcgaattcttttccgttgtcaaaggtaatcgatttgaagaagtgccgcgggaatttacgaagccactgacctaagtgttggttaatcgcatcagccgtcttttcgtgcacattgagtacaatttcgaccttcgattggcgttcggtcagggtcattaccgctccttggtgctttttgccttggacggtatcagcttcaaggtgtccaaattcagtggcatagtgcggaaagtccttggcacgctcgtgaatacttcgccccaattggccagccttcccgcggcgctcaatatagccattcgggtgccgcttacctcgcatgggcaaagcacggacatccaaaccgaactgcccccgttcaaacatccggtaaagagttcgctggttacaactaattgggcgctcagcgcgcccaataatggtatcaggcgtccacccctgggcaattttgtcgttgatataagtgagttcagccagtgacaactgagtacgttttcggccacaacgttgcttattgcgcatatagtgatcttgataatcagcaattgaggcaccggtttccaggtaacgataaacgcgataaacggtttcggcgctacggttgatcatttgggccactcggtacgctttaagcttttgcacgaaagaatgggcgatgattgtcagctcgtttgtggtaagatgggtgtaagtcatttgtggtttcctttcttttgtttaggggtattcaaaagtctaccacaaatggcttttctatttttctaacttaattttacaaacggcgttttgcaatcttaatttaaaatcccagaatgaagaatatccattctgtttgagaatttttgaaattttacgggtatcagaaaatcctaacatcctggttaattcttgttctgttggattgtctttcttctgacaaagtacttcataagtttggtggatatcattcatagttataacttttttataatgttgatattttgaaattccataatgggtaagaaacatttgtaatgaaccaaaatatgacattattaacctcattggcagtttataaaaatgaattaaatgctcccaggtaaaattagtctctcctgactttattatttcattcattctgcaatctatttcttccatagtgtaatatgtttgatcatcaagatatgttgcggagatctttgcagtttttataaattctctccagcttccaaatcttcgtacggcagttccacttcgtttaaagtctcctggatgaggtgcatatcccccgttttcttttgtaatttgctgcacatcatgaattagtacttgattcgtaaccctttgaaccataagcatatccccccgtatttgattattcgctgtaatattaacaattggatttagattgaagagatttacttatttattcaaaaaatcaacttttagcctaaaaaagccatcacaaaaacatttcattaaaaaacgaaatatctctgcaatggccaaaattaattctaaatattttttgttcccagaagctcggtcatttataaccaagtagttcacacgatactttggctattcatcattgtcattgcaaacagccaaaacgattatatctccctcaagaataatgctaataaacaatgcacttaaaatagataagattgtattgatatttggagcctctattaaacgctttacagcgacaatcaaaaagatttgaaaatatatcggccaccctattaataagactgcagcccaattcagatgtttcattgccattccccttcctaagcttagtttatgcttcattaccatctctcgatttccttatcaccctcaaattcccaatatatcgttttaagtatagcgattgtatattgagttttattaattgcttcagtttcttaaaaatgaaagaaatgggttaatacttttaacatagagagataggtaaaatcttctatactaaaaaagccaggccttaaacctggttttttagtacgcttcccctttataatttattttgtatatcctctaaattacgacgaatttctggaaacaatctatcaaagatctttgtggcatccttcatcatttgactatcaattgcttggtactctggtgaggtctcgtaagttgaatgtttatcaagtaaagctgtttgcagcccagcattatccatatacctctcaaagcaacgagcaaaaacctctgtcggagtacaataatactctggcttatctaaggtaacgtcactatgaattatatgctcacgatagcgattaacaatattagtaaattctggttgtaaactaatttgacaactctgtgactgataatcaaggaagtgaccatattcatgaataaatgagtgaaaacctgcagtaggcataaagatttcactatcctctggtccacgaaaatcaatcactatattattaacagcaggaatatacattcccatcgcatggtaattacctaagcggcgtaaacgtaaagctggtttgtttagaccaccaggtaatacattcaacacacgattaacctcgtgttcaaattcatgaaatgcatgataatcaacatcattatctaactcaagtttagaaaatgagttaagcaacgagctatgattcatcagtagagatgtatcatagttaatatgcttttttgtttgccaagctctcgcacgagttttacgcgcaatagcgtcctcgtaacgttgggaagctacgatattatagttatcaaagacaaagttacgtataaaatcaattgctctatttcgttgaacagtttcttgccattccttacgactaatgtcatgattctgtaatatctcggcatatgtatctggaagtgggcttttttcaaataggaaagcatacttcttattactataccgataggcaaataattggtgtaatagctcattaagagtctcacgctcaaatgatggttgctgctcatcataagcattttttatagcaagcaccaatttaccatacccaattaatttttttcgatttacatatccaaatgtaaaagttggaatgtcactaaaatatcgtacttgaccagtgtaagtatttccacaagtttcatctgtaactcggagaaaccttaacttttcacaattactagcagtatacaaagcaaagtctttctcaccttgatatagctttttatgagccttcaggaagggattgtctgcttcgtttacagccttagcactactaattgattcattatcatgatctgataaataaccatagtaagtaaggctaccaatgatggctgctgtttgctcataatcttcatctttccagtcaccatttcgataaatataaaatgctaacttacgaaagagagtatataatgtttcatttgctgttacagtaatcttactgtaacgggtaataccaaatcgttgatgcatcaatgtagttagagacatcaatgatgatttcttatgaatcttctgttttataaccatagctggtttgagatcaaccttctcattttttacagctattttcttagttggatttaccggtatatcaaatatagataattgcttaatcataattattttacctcctaaaacaaaagagaccgttgttataacagtctcttctaataccttttattcaattagttactataatttgaggttaagttcgcctaacaaattaatcctataattgatgccatggccatcgctatataaaccaccgattattattgcgtcaacatcaatcggactaagatgctttatctcactttccaattgatggttagacatgtatcgataatctggcacttggcgttgtaatacttcaatagcatcttcgatagctacgaatacctcataaacactatgatcatatggatcaaatgctattaacttcatatttatcaacccatctctaactaaaacttactgcaaatacatccgaaaaaagatttggattaccgtcaaatacatgtttgaggcttttcttaattccatctaaaatgggtatatctttgtcagtaaagtcatttaatagttttttatcactacctagttcgataatcgagcgacataaagcaaatcccagggcatttataattgcgtctttcagttcttcgatagaatgaactgctttcttattatatggctgaatttttggtacatatatataccatccattaccgttaaagccttcatcatcatcaatattagcccagcttacatgaatgccatcttctaacgtctcgttatattcatccacataatcaaataacttacctgaaattaataagctaataaaatcaaccgataatgatttcagctttattatattttccgaatctactagttcatttactttcaaaccatacccatcaacaatttttaaatcctgtgacattagtgtgtcctcctttaattttacaaacagtgtttattaaaaagggaaagtacaaattagtttcccttttattttctatttaaaatttaaaaaattatttaaaacattcagcatactcatcagtaacaaataaccgaagtcgtaacttagcaaactcaatttcatcatagatatccttaccttcaaccaatggtaaaataccgtcatcaatccactgattatactcatcttcagttaaaacagtttccattaattcttcgatactgtcacaaaaaatttctttatcttggccattaacatcaaaataaagtagaaaactgccatctggcaccttacctattcctgtaaatctacaactcatcttaaacctccacatattaaaaagtactttctcaaattccgttatgtatgatagataaaaagatactttacataagcatcccccttttcaaaatttaaaaacaaaaaggttattagctaaaaaagctaataaccttaattacgttttgtttaatattaatttatacaatcaaataaacgaacacatgctaattatgtgctacaaacacaatcaaacgaaacttactaaacatcttagtaaataaataataatcaataatctttgattcactatctattctagcattactgtaaataaaaaggaagcccgcaagcttccataggtcttttcgaatgtgttaaacatttcttgtgaaaaagacgtattttatcaatgtaaggccattacaacttttaacgtgacgagcttattggtttactattttcttcaattctttataaaaattctcgtgcggacctgctaaaactacgatgacaatttcatcattatcattaatagtataagcaattcgataatcaacacgatcgtatttaaatccataagcaaaatagctgcttaagtcgccctgcttttcatttcctacatatggatcgtttgctatcgtgtcataaattgcagcggtaaaactctttttcagttgcctattttttattttcttcaaatatttcaagactcgtttggtagggataacactataggccaatttccttctcaaactcctctctactcatctgcttgctatttgcagcttctttcgctgctgcatcaatcaatttatccattgcagtaggtatatcttttttcatttccttaaacttactaataagcttttggccttcatatccttgagctaccaaatctttcaaaatatcctcatcaaagtcaaaaaaatcgtcttcgttaacgaactcatagaaaattcccttgtctgttaatcgtgggcgtaactttgttccctcgctaacattaaatgctttaggaacggtaaccgtaagagcgttaccttgttttctcgttttagtaatatccatgttatcacctcagcattattatctcacacccgctcagtaattactagtaattatttagtaggtattatcaaaacttattactatgtctacgtatctgttttaccaacatttcctcccaagctaaaaaacgccacagaatttgctctgcgacgtttttgtttttatatcacatatcaattacaaataaatatatcattatcttatctaaaggcaacatctagtacgaataatgatccttccattttatagcaatcccaaccatggatttctccagatgcaagtctgtccatacattcaacgatagggcgtgctaactccatgtattctattttgctatgaactgagttattgtctgcaaataaacagttatagtttgtaccatcctttactttctcagcatctagcttaacaacattagtaattttattaagctcatttgttattgttaaaatttccatgataatttcctccaattcttattttctctaaaatatctgttttactttgccaactgcttaatcgttttaattaacgatttgcaattaccacaactaattgcgttattaatttgaccatctttggcaatattctcatcagtgtacacatcaactattgactcgctgccgtcaacataaacattaaaatgcaaattttctttgtttccacccttaaggaacttggtaataatctgccattgtaggccgttcattaatggcaaaatttctttttcttcattccataatttgtcttgtgctgacatttcttctgtgtataaaatttccattttattcactctcctaaaatattttttctaacttaaaattaagccggtattttcttgtaacgccaaccatgttcgtcaaaataactcataatttcccaagtatcatcagttgtatattcattttgtaaaaattctttccagtcactaattcccaaatgattcattgctttaattaatcgctttttattgaagtaaacattaaacatagtaggacaatcacaaaggtaattgtctctgttatcataaccatcataagctaatagcattttattcgctctccttaattacttcctattctagagtctaaatttgttgatcttctcgaatgcaacggtaactagtatcagataccacaaaaaaatctaaaactctaattccaaggatgctaccagcattctcaaggcgatgaaatgtttgtatatcattgttagaaaacacaagtttaccggttggatgattgtgacctatgatgatgttgtcggcattgcaaagcaaagcatgttgaaaaatagctttattgcttactaatgcttctgttgaactacctaacgcaattggtgcaataccaatcaactttaagtggcaatctaaataaaatgcatagacatattcctgtgcagaattaccaattaaatttttcaatagttctcctgtaaactcacttgaagttagttcttggccaattccgttactaaatggaatgttatagctaaattcttcatgctgaattttaactgaagagaacattttaatatcttgttttttagtaagtgacgtcataaataaccattccttttcttatttaatttcctgaaattttctttttaatacaagtaatctcgatattctactgagaagtcattaatcaaatctaagtcgatgtttccatctctatcgataacaccttcaataattttggctttattttctcgatatgcttgttttaatactttaatccaacgttttgggtcaattgcttcatctaataatctttcgctgtaattatcaatgttattttcgtaataataacccaattcaaagtcaaatccgttaccttgctctaatgggctacaaaacaaatcgtagtaaaaatcccacagaacgcatgcaataaattctcccttaatagtctttttctcacgatacttatcagcataatgtgtaagcactgtatcaaatgtaatacttgcactaagaaattttctccgttgttctggcgtcgcatcatgccatactttactcttaactaattcatcaacactaaatggtagtaaatttgcatcaatcatcattttcttcactctcctaaattatttcctaatatcaaatacaatagaccttttcaatcttaaagagacttgctaggtattatgtctactgcttgtacttgtcccaatttactaagccgataaaccactcgcactaataattcataccaacagttgtctgcataatttttagcgatcatagtttctggataagagagacacttttcctttttaaagtcgttaactacaaaaggcttttctaacgcgttagcagtagccaatactttattgatatcaaatttatcaacaatgctcttgttacctaatttggatattaagaaattattatgacattggaaattttcaccaactaccttaatacctggttcgaacagcactgcttgattattaacaacatcccagccgattgatttaccatagcaatcatcgttatcctggtttagttcatgaatatccattactaagccactaaaggtattgctattttggttttggactgcggttgcgatatcttgctttaacagtttattagcagccgtaagacacgcatcttcactatcaaaaacgccaagcgatgcgtaatcaaacatattctgcatatcagatttcaaaacatataatttcttcattaaaaattcctccttaaaaaataaacaaaaaggactatcaagtgactgataatcctcttccataaagtcaattaactttatgattaatatctaccaccatgagctatagaaaatagctgctttatataacgtggtttgtaaagcctcattaatttctttgcaaatttttttgaatcttaacaagtctgttctaaattgagcagacgtttcatagtagtaatcgtcatagacagttggcccataaaagaatccagaagtagtcggaaattctttctcagcgatctcttcattaccttgttgatccagcactctatcaattcgtcctacaatatcatcaattgtcacttcatcgactttagtaacaatgcagttatattctctattcgagtgaagttcatccgaattatagtaccgttcttcaaaataattttgaatctgattagccttacgataattagtcctggcatcttgaacgttaaataaactatgcataacaagctgcttcccgtcaatatcgtagacaggaattaaatcagtaggtgtgcgtggtccatcatcaaaaatgatacttgattcaagatcataaccagaaagatgctttaaaatatctttcttcattttgtttgactgtatcatgttgacagaatccttttcagttacaatgttcacaccaagaaattgatctaaacccatgttaaatccatcctttcattatttgtaaaattcttattcataacctaatttttaacagtagcaatatctggttctaaaaacactttattaagggtctttgcaggaacccaactatccttatctgaaatatcaaaataatcttctgcgtatcgaaaaataacttggggatcatctggaaattcgttatcacttaaataaattccagaaaccgaatcagttaattccaaattacttgcatccgcgtagtaatcaatggagtacacttctccatttgcgtagtttgtaaaaagcttcaattcgtcatcaaatacttccaatacatggcaacgcacagcttttgtaatacgactaacatggtactcttgacgaatgtctttaagcgatacaaaaatcatcccgcaaattgcgtaatcaaaacctgcatccgttccacggtaatactgaacttgtgtatgtttaaaacgagtaactggttgtaacaaatacccatgtttataaccaagttggtaaaacgcatctcgaaagttctcaaaacgatgcgaactcggattaattaattgagcgtagtcattttctccaagtagttggattaaactatcttccatattttggggatgttttccgtcatcagaattagacccatcatcaaataaccataacgtagctagattgtcccattcacgtgggttttcgccacagccatatgagtcatatgacaactgcacagcttcattggtctttagatttattaaatacataatctttactcctttagttagtaagcaccttgctacattgccatcaagcatttagtaataaacaatcactttaataattacattagaatgattgctaaactttttaccaaaagtattacctgccttttcaccctacctggcaacataattttttaaaataaaagaccactaattattgattagtagtcttaaatccttattctttataattttatagaaaacaattaggcaattaaatgtagccaattccttatagattaaaattaaaaacgtttaatatatactgagctattattaaaaactgacgctttggtaatttaccgatcagcttggcgttccgatttcctgaaggagaaacatcgagagtaaaaatctgaccagtattcaccttacttggttttgttaggccttcatcttcaaaggatccatttagggatactaagaatggtctactctttgtggtagatgtaatgggacaaacaataaccaaaggagatgaacgattatattcatcccgactaataaccaaagctggtcgtcttttctttatctcatgtcctttagatggttcaaaatcaacaattatgatatcaccttgatgaaacttattcaccttctgcacctcctggcacaaagcctgttgctaaaccatctgtatccatatctttatactcattttcagatacattagcataaatatcaggtaccttaggaattaggatcaaactgccatcagtttctttactaataaaaaattcagttccgagttcataacctaagcttttagaaattgttagaacaagtgagtttccttgttttctgattttagcagtttccatgataatttctcctttttattttagtataacacgtatcactcggtattacatatggtacatatatacataaaagctttgtgagacactattatggattcttaactaaaacacaatcattaagaatatttttaacttcatcgagataatactgagttaatgttgtagtattaggaaaccaaatcaccattggataatctacccatgtaatttcttccttaatatccaaaacagcttccacaggcctatgaaaattaccttctgttagttgtttataaactatttgtattcttttcttagttgccttaactcctaattcttgcaacataattttaatcgctaaatctgctgcctgtgaatatagggctaaatgcgcattcatccaatactttgtatcaatcaatttttcattttgcttattggtttttgcaacttctttaattgtggttgccatgtttaataatgccaatttttctttttctattatcttagtattcataaacagtttccttattttagaaaattacttttagttccaaccataactggtttcaactacccaattatctttagttaagtaatggcaactttcgtcccatgtgcgtgacaattgaaggcccaacgcttttaagtcaatgaagtccattgggttcggtgcgccattgtaatctttttgatccaaatgtttatcagcataccaaccttcggttaattcgtaataggcataatcttctaagctttcataaacaaatagctgatcatttttccactcaccatcatcaaacatttctaataattcttttgctaacgatggatcatttgcttgcaaatcatcaaaattgtcgtaccaggaccccgcataatcttcacatctttgcattttgatttcctcctcgtactattgaaatgaaaattaactgaatattatagtagtaattcactttaatagatcatattccgttgcgactcggccattcttattagttaaagtccaaaatgtgttgctatattttttataaacaacatttttcttaaaacctcggaatggtgttttcttcaatttaatagtaataataggtgaattgatatcattacctgctaaacgattactaattttctctaaaattctattaggagtttcaaagtcactaaaataccagatagaattttcaaaatcatccattgatattcctctagcgaatttcggcttaagacagcagtacaatttctggccctcatatactaaatctttgcaatctgaaggaccgacaaagactttccacgagaaaagattaggttgtgaagttacatctaagtgtcgaatacgaacttgacgactgtacacattaaaagaatttcgagaattatttacgtattctttaaccggtaatgtttctaaggcgaccaaataatattcttccttaacccttataagctgttccatacaagtatcaccatagtaaatttccaatttagcagggatagtttccactcttgaaaagtatgttaaagctttattgaattctctaataaaaaattcttgtgcctgcgtagtttctaattgtgtttgaaaatagctcactttgtccatctcctaaatatccttatgttatttccgtcactaaactaattaaataactatcattcagctatcagattaatcccaatggatagcaaatatatactctaagatagcttgcagttatatacattattactgctatagtctctgtgctgtcctattttccaaccatgctcttcaaataccatggtactcataccaatctcatcagttagatactcattttgaaattcagttaaagtatccgaattttctcgctcttttaacgcctgttttaaatacctgcgactaaaagaagcattaaatatatcattaccaacggtggtacttcttgaacgattcttcattactaatactctcatcttttcctccttgatcttccgatcgttatttatccgtacataaaaagagaacctacattggcctcacctccttaaaataaaagatctaactaattaattagaattagttagatcctctactagttattcatcattttatctgcagcctcaaacaaagcatcccattcggtatcatcttgactattattatccggcttacttttcacactgctatctgattgatgcatagaactattcgatgatgtaattgtttcaatctcaccaggttgaagtaaatcatcagtttcgtccatcttgttgacatcatgatacacattttcttgctttgcattagcgatctcattgaacgttggtcgagttaaatctttcgttacgattggttcaccatctgtattaacaagaatatcggtagctggaatagaatcatagtcaacatgcgtttcatcgctttgcttagttggttgctccttagcacttttatcaagatcctgagaagcaccctcattatcttttcttatatcatctatttttactttatattgaggagcaattccatctttacctagctctggagcttgtggaacaaacggttttatactactcaatatttgttctctggtcattaactgtttagttgctatttttttatcctcatcatgtttgtcactatttgtctttttcaaataatgactagcaaaacgataaacggaataaatcaataaagcaactatacttaaagctataaacaataaaaaaacagagataattaataaaattggattactcattttttcctcccttaattaataattaaattttaaaattaaaaaaggacctcaagaacgggccttaagatccttaaaaagatttctgaattaaatgttaatgtttataaacaaaaaaataatgatactaacactggtatcttacggaacgaaactactacccacgattgggtaaaaagaattgtaaatcaattcaatataattacaaattaattatatcaaaatagcagcaaaagttaaatatttttgaaacaatgatattattcaatcctaatttgatagaatctaatgctgaaatgatttatctattctcttaatattttcaatttgtgaatttttgacgtttaaattttaagaattatggtattaaaaatagtatttacgttttagcttattactttatgatatgcttatatttgaaaggagggataaaaattgaaaatggaagttagctttgaaatgactgatcttttgctcggaaatttcacaaaccaacttaagactgggtatcaattagatatggtcgatttatctgtccctccgattatttctttacataaagcacgcatagataacgttaatgaatattctttattaatgtcaacaatgtgtaaattagatggacgaattctaactctcaagactcctctagtttactcatataatggggatgtcaatgatgacctcaatttggtttgggaacgctacaaggctctgacaaataaaaattctccatttctttcaagaatttgtgatattttaaaatcatttggagtacagacagtccagataagaactaatactgagtctattaaaaggccagaatttcaaactattaatctttaatctaaaaattgctattccttataaataacctcctattttgaccaatcgaccaaagaggaggttattatccactattatagtgaatcactcatgcaacagtatctgaataaagtaatataatatcagaagcaataaatttatttttctcagtatcctgctgcacttctaccagtttacgatatattattgaaccattatctaagtcatctaccttaaaattgtacaagacccacctgctatgtgggtaggtaataaaaagtcataaaaaacattatggagtaataagtgtaaagtaattacaggctaatcaaaaaagcagtaaataataactatttactattcttaatcatattcccataaagcatagtagagaaaataataactatacttgcaatcattctgtaattcatagtttgaattgcgatcattgtcactgccccacttaaaaataacaataaataataaacacttttctttattatttctaacatattagtttcctttccatgttaaatattcttgaaatgtttcaaaatttatcaaattatttgttttccaatacataacttcctcactttcatcaccacttttttctctaagttcaataaccttttttaagataataaaaacttcttcaatagcggagcttgaagaatgataaaacaaagacttgtcattgatgcgtttttgaatttgctttctaacacttgtaacccattttttatctctcaattggtattctaatgcattgcagtttgcaataacttttcctcccatacttgtaagtactttacacaaataacctgttactgtagtatttccatttgaattacaagtacttaaaactaaacacggtttaccatctaagcgtaaggtatgtgaccaagtagaaagcttttctaatattaattttaaatctgacgaaatattatgcatatatactggagaagcaactacaaaacagtctgatttcaatatcatttcttctaactcgtaaattttggaatcaccatttctttgagtatagctaatatcatataacgtattcgggttgagtctcatcttgttaaagtctctacaaaacaaatattgaactttatactctttgctatctagattgttaaagaggctttctaaaaagaattgcgtcgacccttgatatctacaactgccgttcagtactaatatccgtttcaaattcatcatcctttcaaaaaagaggctgggaaaatttttcaccggcctcattctttatatcaaccttgttaagatatcatggggattaaccacaaggcggttaattactctagcaccatcttttatgagtaaaataagcactaaatgctgcaccactaccccaacttagacattttccagaagatgcacgtgatacttgaattgttgcccgtgaaatcgcagaagctgctggtgttgaatccacttggtattcacccataccttgaatttctgtcattttttgtaaactcatttcctcaaagttattacctacaattttttctaattcttctttgtccataacaaatacctccctttaatgatgatgcatagcatgtcttgttatattggctgtaagagctgaaaaggcagcactttccataaaatatccaggcgtcgaatctacttgatattcacccataccttgaatttttgtcatttcctctacagtcatactttcaaacgaattccctattacaccttctaattctttttcttccataattttcaccccctttcaatttccaaaagtaatggattagttttaagccctttatgacataataaggataaaccgatacccgaaagtccatcaaataagcctaacgcagaaaactttccaaatcttctaatagaatagtccttatttaatatgtaatttcctagcataatattagttagtaagttggtcttttccttccatttagtagaacccgtctgcataaaaagttcatgcataatcataattattcctgcttttccgtggcataatgtatcattccttggcgcattttctaaatcatttaatttttcttgtgcgtaattattatcaagttgcatataattacgcgctaaaagcattccagatactcctttacaccatcccatatcattcttcacaggagtaatttttttcattaaagcacttgcttggtctagctgcccaatttcatataagcacattgcgtctccacaattaccatgcgcaacaccgaatttacctgaatgcataatacaattcataaactttttttctaatctattcattacattttgtgagatgtatttaaatccaaataatcttttctgtaaatgtaaaagttttataattccacctaaaccattaataaaatcactaattagttcgcctttttcaatgttttgctcaatcttcttttcaagctgttttaaataagccacttcttcataatccaaagttttataaagactataatgaaataataatgggtatagtggcgataaaaatcccttaaaggctccttgtacctccagatctaatgacatattaatggatgcttttaatagtttcttcgcaaattctttatatctagcttcgtttttttcatatcctaattgtataaagaatactgttacaccactaattccacaatatagactttcatccataggtaaaatatcccaattgcctgcattattgatatttatggtcgaaataataacactattttcatcttcgaatgcactattcataatagtatccgcaatactgcttgcttgtctcacataattaaattcttgatctaacaaatctcgacttttctttcttacatcagtgattctatctcctactgataaagaagctaatagaagtcctctttctttttctatcgtttcgtaattgaaattattgattctatctaatgcaaggttaagtcctgatttcttaaaatatgcatcataattttttcctctactatcagtaatacttgtcttcccaactacagcagaaaaatagggaacatccccaaacagtaaatcttcaacttcactatttactattctcttatcatcatatggataagcagcaatatttaacattagcctttcacgatatttcatttcaacattataagatgggtgtgctgcataatttaacatcgtttcataacgttctgtactcttcgttaaaatacgaattctaaagtttgaaaattctttaacttgtttttttaactctttaatattattactaacaaaacttgtcattttgttataaccatctagaatcgctaatctatatttttttacattaacttctttattattacaggtaattggaatattttccccgcctttaacgtatccttgtcttctcatttcaaaatgaaaatttgaattttcaatatttacgggtacgagtactttatttttcaataaagtttctcttccttctagtccacttagttctatcgcttcattatttcccattggtaatttcgtgggtaataagcaggaaccctttatcgaatctctattcaaactcattaaatattttccaaacgcgttttgaggagtaattaatgaattttgaaacatcgtttctccatcaacaagaattggttggtccttttttgcaattatattctctaaatgcaaatcgtttagccctaataaataagaaataacaataaggtatccataacgttcataataatcggcacattcgtctttacttattacaggaacccgtgttacaaattcaaaaaaagcataatctttataaaataatcctttaggtaaaaaatctatatcaagtaaagttgaactagacttattaatccaattacaaaacttttcaaattgctgaagaattctaagatcacgaggtttatatactatttttttatgatttaattctaagattataactgtatttcctttgcaatgggaatctcccactccaatttctatattagttaagacaatgttttcttgtttaagatgtaagaaattacaaagatcatttctatgggtgccaattgcctcaccaagttttgataaatttgtcacaaaaaaattgacgcgcgttattattattctagataaggttggatactttcttaaaaacgctttaaatctagtttcattacaaaagttttcttttataaaagacgatagtacatctgtatcagcttgactaattcttataccagattttattttctcttttttatatttatacaactctagtgctagcactttcccactttgtctaaataaatcattgattagaaactcactcatagcttcgctggctttagtagtaattctaatttgatgattccacccatcgtctatcctctgcattgcatattctacaaaaggcttaaaaaatacatctagctttaatttatgcaaatgtatgttactaaactgaaatttttcaataatttcaaccaattctttttcgaaagggatctccgaatctactttaattaacggttgtaatgttttcttaaaatcatctaacagcaaatgggcattactacagtactctgttaaatcctgttcattaaataaagtgcgtgtgtttttccattctttataatatttatcatccagaaacggtttactatatatagcacgttcttcaacggtaaatgcatccgttaaatttaaggttttcatattacagtcctccatttgtatttatattttaaggattttctataaaaggaatactttttttattaaacgcaccatattatgaataactgcgtttatagctaacttcaaaagctattaactgtttaaggttcattctgtataaacaaacatatgaagttttctaaaataaaaaccgtcctaaaactgttagattgtataaccacaattttagggcagttttttcttaaattgttttattattcacctattttgagggttcatattacattttttgtcatcctatgaatttaaataagtttttttctttttggttaattcttcataggtaccagcttcaactattttcccattttttaatacatatactttattagtggacttagcaacagctagtctatgagtaataaaaagaattgttttatgtaatgtcattaaatttttaataactttatgttcagtaatgggatctaggccactggtagattcatctaatattaatatttttgctggcgataaaattgcccgagctattgctaagcgttgactttgaccaccagaaagaattaagccaccttcatcgagctttgtgttgtactttaagggcatttcatcaatttcattgctgatacatgctattttgcatgcatttataatttcttccatactcttttctttatcacatccaacgatcaaattatccatgatagatcccgagaaaaggtatgtttgctgaggcacatagcatataaaatttcgtaattgataagtactaagttgattaatcttaactccatctactaaaatatctccactatttgattgtaaaaatcctacaagtaatttagctattgttgattttcccgacccactttgccccagtaatgccactttctcatcatttttaatccgtaaatttagtttttttaaaacttctttattattagcataatgatatgaaacattctttatcactaattctcccttgcttaataaattaagattattttttctttgttgtagtgtgataccattttgttcttttttcgaaagcatcacatcatttaatctatcattcgctacctgtgcattttgcaatttgggctgtaaattaattaaattttgaattgaactagtaaagtaactaaataaagcattgaatgcgaaaagttgtcctagtttaaaatcattattcattattagatatgctgcttgccatattattaaaatatttaacactaactgtacaaaaacttttaatgattcttgtatcgaattagctatgttatatttcatcaaagtttttaacaagttagtaaagctattttcgatttttgcataaaattttgtttcagaatttaatgatttaattacttctataccttttatactttcaataagtaatgcttctaactctgcattcctgatcattactttcttacttaatctatcgaataacctagtaaaagaaataattattacaaaataaattggaaaagaaaatactgctagaaaaaataaatccttactttgaaaaaataaagcacttcccaacgtagtaacaattattgtatctagaaaaagtgtaacgactgaaccagctaatgcttctgtaattttatttgcatcattaaaccttgaaacaatatcacctgttgttctagacgaaaaaaatcctatctgcaaatcaaataatctttttataaaatttaaaagaatatttttcgataagttctgtcccaatactactagtgcaattttttctaaaaaagaaaaaattgcactaaaaaagtataggattatcaatccaaacactattatagatagtaagttatatttactttttggaatcaatgaatcaattacgaactgtaaggataacgaactaattatatttattaacaatgtaaagattgcaaatagcaaaatttttattagaagcaatttattactaaaaagttgcttaaataaatagttaaaattagattttctttcatcaataggaataaagttgtctgctttcgaaaaaaatattgctgctccactccattccttaataacttcatctatttctttttttatggtccctattgttgggtctggatcagcaatatacacttttttatttttaatttttaaaactacataataatgcaaaattttttcttcttttacaatatgaattataaaaggaaatggtaacttttcttttaataaaaagttgttttttgcttttaccgccaaaggctctaatccatactttttagaagcttctactaagccataaatgttcgtacctgaaatactagtattagcagcattacgcaaatgttctagtgaaactcgactaccaaattctttaagtatcattgctaatgctgccactccacaatcctcttcatttacttgaggaatataattacgataatacatatatcttcctcccacctaatcataactaaaataaattaattcgtatacaattaatattaagcgtatggcttttcgattagacgcaaaaaaaggattttacaactaatttagattcaattataattaactaaatttcaaatttattatattggagtaatgtatatgaaagacactaattatataaaaaaatctctagagaatcgcgaaattcaaaaactgactgaagatgaaatgaaagctttcattggtggaactacttatcatattaactacgatggatatgcgccaagtaggaatccatgggcttggctaactcactgggggcataaacactaataatgaactatataaatccattttacttatatgggttagaattttttgatttatttattaacacattgttaataaataatatagctggtaaaaggaaaataaatctactttcaatctttgaaataggagttatagtcttagtattgggctattatggatatacaatttacattgcatatgcacttcttttcttgtataaaaattttaaacataataagcgggtcttgaattttgaagcgcttattatgtttgtatgcagtttatttgtctttcttatctcaaacattaatagtttcattctaaacacctggtttttaccacattatagtaacgatgttttaatacgttttcaaatagtaatttctgttattatttctataatgttagttagtatttcgtttttttataatcctttattttcgaaaatttcgaacaatttatttttaaaatataaaggtccaattttaagaaaatttgtaattacttatgaagtttctttcttctttattataggtattgcttctattgctgaatatttaaaaatagaatttaaaattcaatggcttttaattttatgctttctatttctttcattaagcgtaattatactgaccggtattatgtttacatacaatagtaaaatgattcagctcgaggagattagaaatagttatattaataaacaattgtattggaaaagctttgaatctaactataaaaagttgagaaaactgcatcatgactatacgaatcttttaataacgttaataaggttaattgagaataatgactttaaacatgcaaaatcctatgctaattccttattagattacgatagtaaagtatattcgcctccttcattcgatattatacaaatttctcaaaaaatttataatcaagaattacgagcattatttttagaaaaggtgaatataataaaatctcagagaattaaattgcatttggaaatttctgataagatcgctataccgtctaaattattaattgatctattaataattattagtaatttactagataatgctacgagtgcagctttacagagtgaccaaaaatctatttctataagcttaaaaaaaacgctctctaattgttataaatttactataaagaattcaataaaatctaaaattaatattgaagaattatttactgaaaatttttcaaccaagaaaaaccatatgggaataggacttaataatgttatttcaataattgacagttcaccaaatttctttttagaaacaaaatcttttaatgaatggatcgagtttgaactaatattaaagaggtgatgtcttatgacgttagagatattattacttgaagataatcttttgcaacttcaaaaatataagaagataatccagaatagaattatgattaatcctagtaataaatcttatgatctagagcttgcactctactcatcaacttcagatgaaatacatcaatacctccataataatagtaagaaagatatttttgcctttcttgatattgaaatagggtctacgtattcaggaatagatatagcaaaagagattaaaaatactgaaagtcaaaattttagagaagtttgttttatttctacttatgataatcttttaataaatattattaatgatcatgtatcaccttttgactttattttaaagaataatggaatcaattacgttaccaaaaagattcaagagaatattgactgggcttatttaaaatataaagatttaattactaaatctaatcaagaattatttacatatgagtctttccccggatatattcatcgcattcctagagataacattctttttatatctactacttctttgcaacatcgtttaagaataacttgtaaagataacgaaatactttttcagggggaattaaaaaatattgattccaaaaataatgcattctttagagtagatagacaaattttagtaaacttaaataatatcgattatgtcgattttcataaaagaaaaatcttcttcaaaaattctaaaaacaaaaattgtaaaattagtctacgtaaaatccctcttcttagaaggctattacaagaaacgtcgtcgccggtcacccataagaaacaatgatattacattatatcaagagttgaaattttgcgtatttatttaatgatagagcgtagtaattcttcatccaaaaaccagcaagatctttaaatttgcagaatgataattaggtgaagcatagtagtatcactaacacaaacaaagccccttggcaatcatagtcgattgccaaggggctttgtttgtgggctactctcacgaatttcttaacgtttatgatgcttcttatatactttctgatctaactgatagtagtcatcaaaaggttgagcgttaacctcttttaggttcataaatggatctccagcctgcacatatcgacgaattggaaaattccatttatccaattctgttgcaagttgtgtttgcttccaagcttcataggacttctgatactcagcggccttttctggatcttcttcattctcagctttctttctaagtcgttcaatgcgatcattctcgtataacatttttatgtcatcttcaagaggaattccatcttccgtccttcttatcttgtaagcaaaactgaatgtatccatccacagaagagcataaccatttatattagctcgaaagaccgcaataataaatccttgtatatctgccattaagttcccctgccaaactggtagtgtctttcctagataacgaataaaaatcgttaatggaattgatctatctaaagagattggtcgttttaattctttttctggcgaaatatcaaataagaagtaacgaataggcgtgaattgagcaaacaaaagtgtttttaatacattaccactagccataaaatacaatgcgtcaagaaaaactgcaccccagcagcaaactaatgcaatccgggaaataattcttaattcttggtccattgaagtattcttaaggtttatctgccgtggtcgcaaaatcacacccccgcactcgttttagaaaatatcctttaatccttttgtaaaagtatcaagtaaattaatactctcgtaacctggatgatttgaaataaagttatgcatatttggtttagttggctgcatcactgcttcattaatataattttgaataccattctgtctacttctgaagacattaatcatatcacccttcaagttcttcaacttagttggatctgcactagaattaatcggattaacctgcgctttatctggatcgataacataagtaccagcagattcatgaatgggaagtttgaattcatatccactatccatccccggccaaatagtgttatcaaattgttctgataagactttggtttcaccatcttgaggatcaacaccagtcataacaacaccatcgtagttaccacgaatctctttgttagtaaagtgagcaaagtcatcaccataaactcgctcaccattggctagtgcccggcttgtctgcggagcatatggcatccccatgtaatcactaatcttataagggctactacccacacttgcactgctatttccactaacatcagtaaagtaactaccaatatctggtgccccgtatggcaacgatatcggaattcgtgattgaccactaatccgatatggagtagtggggcgatgcgtcattggatcaactctagtagttaattcaccacttggtgacatatcataatcttggtatgcttgttcattagcacttaggctaccatcaccagggcctaaattcccaatagtatggtagttaccagcactatccttagcttgaagcattgaataattatttgtaattactgaacgcagagagcccggagcaattcccgtcggttctccttgatcattccgctcaatcgggatcatgtttcgtacatcatccatcgtcatactatgaccagggttactgtacggattactactagtaagattatcaatgaatccactacctgatgtaggttgagctgattgactggcaagtcttcccatcctaggattacgattaagcatttgcgatccaaagccgaataatcccattacctgccttgtcatcctactacttgcacctgcttgagtagcttcagcggtaatttgatttaacttggcccactctgcttgtgattcgttagtagcagcataatttcgtaagttttcatcgttgaaatacttctcataatcagctggagtagcaaaattactctggtcatttcctaacatgtttggtgcataaatctttgagatatctgcacccgtgacgggtcttccactaaccgtcatgccacgtttacgcattgcataagctcgttgattttgtacttggttcaggagatcctggttaataactcgcacagtttccccatgacctgcaccgatggtttgaacaagacttttaccttccagaccttctgtagcattcagtaattgagatcttaacgcaggagtaacatttaatgcatctaattgcgagtttaaattatcaccgaaccgattagcgtcaatcatgctgttattaaattcagcatcattggttaaatcagtatgagctacaactcctccattagaacgaatatatgcttgatcaacagccttcatttgggcatcttgtagaccattacgatattctgcagtctgcttaaacttagcaaattgttctggagtcattgtctgaccagttttaagatcataagcctgctgagcttggtgtttagccgctgctatttcattagttgagatgggagttcgtacatcagcagtagcagcacccgcagcacctgcagccatttgtgaggctgcattaagatttcctcgcaaattgttcattgccttattagcgctggttatcatcattgcctgccgttctgattctggagtattgtcaaaatcgtgttcgtgactctttttccaagaagcataattaaatcccattgcttgtgcctttgcctgaacttcctgttcagtttttggcactccatgagctttatcataaattgaaccatctggtaagccattaataacctcacgggcgttagcttgcacatcagaattagggacaaagttaccgttaatatccttattcttttccatttgtatacgctgctgtttagcgttctctgatggcttataccctttcccgttcatactattctgataggctttaatattacgcttagcagcagctcgatcgtcgtcacttaactttgaattattatctacttgatcaattaagtcattgccttttggtcccggattggcatcaacacgactttgctcaaagtcatcaagagttttcccagtagcatctcgtaaagctttaacgtgttgattatgcgcccggttcatattagctcgttttaagcctagtttaaccagtccaccagcttgctggtttaattgtgcagcacgggccccaatttcaccaccagctactgataatgcagccatacttgctatattaccagtacctgctccaatagaagcaccgataagtcgaccagcgttagggccaaccattccattcattcgtgccagagcctctttagctttctgcttctgcatataagcctttccatttaactgttgaatagcatttcgacgtttcagcaatgatctactatccagagttccatttttctttgctgcttcaagtgctgattcatcatgttttttcttcaaagcttcagccgcaaatgttgcaccgtgcccagcactggataaacctgcagcggccccaccagctaaacctaacgccgcggttccagcaattgctgctcccgtagttaaggttcttgaagtagatgagtgtatacgatctaacatattcgttccaataccaaataaatcagcaattcctcgagaaacaggctggaaaagcatcaagataataaatcccatgactaacatctcaaagtgactggcaacagttaggtccttaccagtcattgtagttatttgagtgactgccgatgaaatagctccaggagatgtagttgatccagctagtgtactaagagcttgattatctttttctttagccgcattctgagcaagacttccaaacgttgatgaattaatccacaataagaaagtcattaatgtcaatgtaaatgcttgaatagcttgaataaagatagttccaatcagatcacgtaaccaattcattgttcttgcttttccaaatccaaaaggccacatcgctaagaatatcggtccaagaatgatcaaaataataaacaccagcatccgtgcgaaataatagaacttaatccaaattgctagtccaacagcagtgcataagtaaataatgacgaaaataatacctgcaaagccgtctcctaaccaattcccctttgtaatagcattaatagagttgtcatcggctcccaattgcaaacaagtcgtcatcaaagtatgaccattaccattggacattccttgtaaaaaattagcaaataattgaagaaatgctccgtccaactgcaatagcattctaatgaagactgggagcaaaaaaataactgatacagaaatcataatatcgataaagttttgataccattctgcccgtgattgtgctggactgaaagcttgtccccaccccatctttgttgctccaacaataactgctactactagcataacagctgctaggccatacatagcaggactaatagcatcaattgcagcactgaacttagaagaataggcagcagaaggaaacattaattgacttggatgattattaatcttgtcgttcaattgactagcaacatccgcatcttcaactttgccgtagccaccatctgttattggattgtaagtaaagacagtccctgcagcaccattttgttccaaccatttgcctaaacctgatgcccagaaaatatgaagtaaagccgaagcaatcttagacttaaacgatgagtcttcatcacttttagaatcatcacttgcctgttttgtatctttgttaatatctttattatttgcttgtgcttctttcttaaattgtggatcactttgggataattgctcttccagatattttttagcagttgccggcatttttccatccttcatgcctcggtcttttaaccctttcataatttcagcatacttagaaggattactcttcttcaaacgcgctaaagcatcccctgttgctgcatcccgtttagcgatatcacgctcataagtattaaagtcatttaataaagctgctgatttttcaccggaagttggtttatgactagggtttacagctttagcagcattatatttagcataattaaatgggcgaccaaaatagtacctaataggatggtcctttttctcttgtgattgttgcttagaatagttttttatccaagccttctgagcctcctgagttgcagctggattaaagactgaattagcagcgtaagcagtcgttgatacaaacaaaatgactaagataattaaagaccatttaccttttttcgaagaccagacccgcttaaaaaagccgggacttttctttttcctttttcctttcaagagttaagcctcctttactgtaaagagttattaatcatatctacaaagttcttctgttttctagcttggccgactgcccggtttgattcagcaaatttcatttcttcaggggatgggttggttctaatccaaatactttccccttcttggcgtaaaataccctctccaggttcagggttaccagtcagaatgtctaatgcgccatcagtcaaatcaacagtattcttcatcaattcacgatgttcaggtttggtggccaaaatatatatgaattctgagttagtaactaaggcctttgctcgtggattaccttggaatcgttcaatatcttgtgtaagccagcataacgaaccatttcgtttacgatctcgtcttacaatcgtttcaaagaactcaaacattactggatcgtcaataaattgtagaatttcatcagcatccagtacttttttagtcattgctttagacggattcaacatccaacgttcccatagatattgggtaataacataataagtaacctttttcatttcaccgcttaactgtgaaatattgaagtttacgtatttatagtcgttcaaagcagctgaacgtttttctccaaaataagtttggccatcaaaaattggacggcttcctgtacgaagatatggtttgagaccgtcaatgagtctagttactttaggatcttcattatcatcttcatcagtattttgatcgatcaatgcttgataaatgtcgcttaaagtgggttcaggctttggaagcttttcatacaattggccatttaaaataccaccatgatcttcatatagagaatcaggatctgcagtaattcctaaatcatcaattacctgtttaattgcactttctaatcgacttttctcactagtattcatccctctatcattgccatctgccgataagattaggtttacaaagccatcaacattattgatcatttgagcaactggtaccttctgcacatatttggtcccatcctcatgagtagtaattttccggccatctgagctatatcgaatggcatcttctatttcttcctcgtccatttggtgaccgttctcatcagtcataatttcttcttcaagaggagtttcagaaactgaaactgcacatggattaataatgaagtctgcgtctgcagtgatagttaggttcaattggtgtagttgcttagctagcattacatactcaccatcaggatcaattgaacggtgttcgtaacctaacaagctaatttcacgtgccatcttaatcttattagaggttgacttacccccaccagattcacctacaaagcccatattgtagttaattggtcgatgcgtattggtcccaaagatattcaagaactccgtattttgtgaaggagttgcttgattaactccaaacggaattcctccattaaaccggccggctgcattacgggcaagatccattttagccagtgaacgacgatcaacatttcggtaaatatcatctaggttgtacattcgtgatccaattggaattgattgtagatatccactttttactcgtttagcaaacggtgtaattgatatcccttcattggctaacagatctgatactgttcccacatttcgattcaattcccgatcactagtaccgtatacaataaaggagattgccacatcatatagacggttttcatcaaactgaatctgatccaaaaagttattaatatcgttgtacttagtgatattttcacgtaattgaaatgtttggccttgctgattttggaaaatagcatttgagtgaataacattcaaaatattactcaaatttttcattgattcccgtcgcgtacgtggcactacatcaatcgtgatatctacgtttccctgagcaagtacttcttgaaaaatatttgtatcaagcatccgcggatatcccgatggcggaacataaacaggcattccatatgtcctactctttaaattttcgcgcattacaaattgttcctgcatgaggtcatctgttgaccaatagctgggtcctataacttgtaaaatacttggctgacctaattcagttgacggagcatcctttttctcttggtattcctcgtttgcttgtttattttcatcatcaatattggcagtatcattttctaaattttcatattcttcataatcttgtgtattttcttcgtcctcgtcaccaaagtttacatgaagatcttgatcttcattaatttgatcttggtcattaatctcttcaaattcttcgtcttcatcatggtgacgattacgaaatcttccaaataatcccataattttcctcctcatctactggtcagtatcatccacttcagtagaaactgttgtagccggttcttcattcaaagctctttcttgctcctccgcatcctttgctttttgttgttcaattaaagcttcacgagcagtgttgatagcctcagtttcaatctgaatttgcttaataatttgtttaaactccttatcattttgatgtgaactagtaaaccaggtaaaacgctgtttcttaactatatcctccaaacgaattcggacagaactatccctgttaaaggttttatacaacacttcaactaatccaaacgtatccagctgagataatgaatggtcggcacgctttagtaatccatttgcacgttgaatttgtcgagttaatttttccattgccttctcgtgtacttgttgttcaatcgcccgtggagtatcaccaaagacttcatccggcttaacgatagctaagaactgaagatagcacttattttcaaagcgatctgttgcacgttgatactgtaaggtatcttcaataacttggtcagcatatgctttcatctgctcattcgtgcctcgcagatattgtgaatgttttttcaaactattcaaaaagtcattcatttctacacgttgactctgtgatgtgattttaagtggtgccgtaacactattaaagaaaacttccattacttgattattattggctaactcttcatcagtcttaagatacgggttagactgagccatttcagcaagcatgataaacattcgagaattatcaccagtctcatactcaatcatgccgttactaattctaattacaccgacttcttttaaaaggtcctcaaatgaccgccaatcatcataggttaaatcttcatcataaataggtgcttctgctggatcatcatcaatatcctcttcaacctcatcttcttcatattcttcatcgtcttcgtctctatatgattgccgatcttcaattggattaccattccgatcacgtggggtcatatcaaagtcccgttttcgccggcgccttataattatccaggctcctactgcagcaactatacttagaccgagaaaagaaaatattataataattgtgtccaccttcttaaattttatcgaagttaaaacaaacagctaaccgccactaaaaacggttagctgtttggtttagcggcgataatttctacgttggcgttttctacgacgagaattattacttcctttgccaccagggtgaccaaaactaaaaagccagcgccaaaagccataatcatgaatcgcttctgactgtcgacctggtttaattagaacaagcaaaacaacgcctgcaccaatggtaaaaagagctgcgaaaaatgccatcattccaatagtttgatcagaaaccagaatattgagcattaaaaatgcccagattccaactgtccaccagatcgcattattgcgatactttcctcgatcagtttttttaccattaattctgcgaacatcactgttcttcattatcgttatcatcctttcttactaacgcatatggcaaacgtgtatttactgcatgatgattagtttgaatattcaaatacgtcccagtttcattttgttcaaatgctcgatcgatctgtatctgcttactcatgtagtacagaagatttccttgacgatcccgtattggccaaaacgctatgtacaaaaatggtgcaatagcagcagtgaaaaaaagtagtgctattagtacagctacacttgcacttgctccgatagccgttagtaagaacttaataacggtaaaaactattacgcctaatacaaggcctatcgccgagatactgacttgtccccaagttgcaaaacctaagacactcttttgttcaccagacaaatcaacaattaattcttgtcttccatttcccatagcgactctccttcaatcatctatcaatgtctttcacagatcattaattattagtattaacgtttaaagccataccaacgatttgctttgcgtgaatgacaacaacagcaccaataataatgaatactaatcctaccagagtttcttgacgttgccgtggatcgccaaacatagctgaagtaccgatcttcattccgcagataattgctgcaataactaaaataacagctgctaaactggttaatgggccaataaagccagcaaaaacatttccaagcacgtcattatcactaggaacatctacatgcttttgaaacatagatgttggatcatcatcagcaaatgcttgaatcataaaaaatttacttgatagataagctactaataccgctaaaaatgagcgacgtgatagcttacgcatcaaagtactcttctttacagttgtaaacattgttcgtaacactcctttcactgattttaaatagcttataacaaagaagggattactatctctaattctttgtatattgctacaaatctaatcgtacgggaatgagcattttcgtggttacaatattcaaattccacaaaaatgagaacctacattctattaatatgtatgacgtttttatgtttatatagtgggtatattttcttgaaaaaggttttctgagcaatttccataacgtaaattagggggatgtttatgtaataaataaccaataattgataattttgaaatgagattcctatatgtttatcgttaaatcatgtgatttaagaagcacttagtctaactgttgctaaacgtcttggactatattagaaatggaagtaaaaaaatatgtaattaaaaaagccatgtgtggtaaccattgttatcacacatgactcaaagctttctataccttcatacctgtcaatatattattgtacttacctctaattaatcctaattccggaaactgatgctcataataagaagaaattttttgcattaaagactgcttaataatgctatacagttcattatctcgatagtcactgtccgaacggattaactccgaattaaggccaatttgctttaaataaagttcaaatgatttagcaaaaacttctgttggggtaatttctgccaaacaacttttacctttacttctagctcgtactttgtcagcgtaagtatttacaatttccaagaattcaggctctaagctaagctgatgatctgaatatttaaaatccaagtaatgcccatattgatgagcaaatgatcgaattcctgcatgagaaatggcagctatttgatggccacttcgaaaatcaagagctattttattgctagtcggtacatagataccgtaattatctaatcgaattaatttaattattggttttgttcgtcctttcggtaataaaggtaatatatgagccaattcatttctaaataatttcagaagtgaagcattatcctcttcactagtaagcgaagcaatatatgcctctaaaccggaagtaactaactccttattagtatcactctcattcactaatagtgcttgatctgaactcataatatatacctgttgtagagaccacgaacttatttgatgtaaataattttcaacataacggattaattgattatgcttatttagattttgccaaacatccttatctctttcgggataagtctgataaaacttttcttttgtccagtcaccctctttttttatcaaaaatagtctattattagtgacaaaactgtttcgattaatgagtaattgctgaactaatttaagcaaatcactaaaagaaaatatcaaattctcctgatctcttgtgtattgataaaaaatatcatttagaatttttgcataccccatgatagttaatggtgactcaaaaataatccggtagtttctctttcctttcacatttaacattctgacttcaccagccactttcaaccgtgaggggtcatcagtcaaaataatgaaacgtttgtatctatcatttcgttctggaataatctggatgatttggtccgttttaccacctactactgacgaaagatcattacaatttttcacccttttgactgctttaatccactcgtgattttcaagattattttgtccgaattcaagatatgatcctactactttactagctgatgcatgagatatttccatatcaatattattcttggataaataaactgcagttttttgaaactttacgatcaaactctctgttttttcaaaaaataatggattactacatttaatgccaaggcgacgtttaagcatatcatttagcttttccgtcatctgacgttttactggtttcttagtaggatggttaaatattagatttagcgataattgttctcctttaatcatgttttttcctccaaacaaaaaaccatcaaattatttgaacttgatggcttccttttatgtacttctaaaattaaaatgtcatgtctgttactcaaacatttctcctaaaaaaacaaaaaaaggataactttctataaagagtcatccttttttattaaaatattatatttttcgatactaaacaaaatttactcagcactacatagtgaagaaaacgaaactctgccaacaacggcaatagataaatcaaaaaatgattagataattacaagtcaataataacataatttaattaatgttgaccggaatcacttgatttttagttggtgatagttgatttttcaatctgtttctttagatcatttattcccttaccgtgattaacctcacggataatacgcatcataactgccgttgaacattcaaagtaattgctaagcattttaacagttacacgctcattatattttcttagattcgtgtaccctgctacaactgatgcacgtgacaaatgtaagtgactatcactaatcccataatgtttcttaaagttcttaaaggatccaaatacccgaacaactatttgtactgggaaatgatgcttttttgttagttgatgccatgtaaattcttgctccccaactgctttaatttgattaaccttatagtcaatctcctctaacgaacagcttgaccctttgataggcgtgtagggtatatttgcctttttcattgtctgctcccatgttccaaaccgtaagcgggctgttgctgagcgcttatattgtcgatagtgtggcggatatcctaatttatagtataaagatcttatttcctgcaaaatctgttcatttgatataacaccaattcgatcatagtatgctttaccctccatttgagcaacaaactggttccacgtatgatacttttttaagattacgcctaaatgaggcatttcacggctaagaggtattctgcccttctcctccttaattttctgataagctaccctaattccttcttcaactgccttgctatccatccttaactcctattcttgggacattttaccgattgttaaaagcccactcatgatatgcttttgtgtaattgcctcctcctttttctccctttaaacacataatatagccaatcactgcttgcttatcgattggcattggctgatatttatgctgggtaagcaatttcacttttcgtggttgagctatcttatagtcaactttttctttgtatatacctttatgatacttcttgctccgtgatctgaataagacctggtcattcttttgtaaaatgccaagttttcggaatgcagcatcgtagtttaaccacacatgatctgatactaaatttccttcttcatccttaagattcttcaaacaaattgttggagttaatttacgatgacctttctcaatacgatcaatcctttttaaggctaaatgatcaaaacttgcggtaaatgtttgaagttccccggttccattttttaatgattctcgcatattcacaacaccttcttttatctcatgactagtttagcaaatttagatcaatcataacgatttttagctttcttttttattcctacctgtaattttttcatacactttggtaaaataaaactgtattttagatttacttttattcttgctaacttgtttagcgtcttttcgttttctagtactttgttgtactttttatttttcgtttactttttaatcttgcaatcaaactaggactttagctctctaactatggtccttttattttttaaatgtttaagggggatgcttatgtagagtatctatttatttgtctgttaaaaatactttgatttggaggaatatataatgacttattttgatttagcttgtctcttattaggcaagatgatcctatttatggtaacaattttaattctcggtttcttgctttttaagctagcaaaacactggaggattattgttaaatttattttaatcattctttattgtccttttttctttttcaaacaactgttaattaaaattggtcattcatcaatctgtcataattcttaagaggtgagcttatgctttttactattattttcatgctaatattggctctttctacagtggtatttggttttatttatggtttactctacgaataccgaaagccgttggttagattagttcttattattttatatcttccaaccgctttaatcaccaatgcactatcctttattggtaaacgtatttaaaattattcataaatcccactagctgaaaatgttagtggctttttttgtacatttttttcaaattcttctcgatgtattgtagtgatagtgtacttcagtagttttttcagttggtgagactggcttttcaatattaggtttagtgggaggagtaggtttcttttccttaaatggagtttgaggaattgtagtagatggcatagcccatgtataaccataagttccctctggtccttgaccataaacatcagaactataagtcatagtataactgttacttccaggtgctattagtcctactgtagccccatagtattgcccggcttctcctgaattgtcccaagctatccatccatcctgaccatccttataatttcttattaaaagatcgcctttagtaaaattaccacctggtataccatcagctgaatacagatcattgttttctaaaatagcataactaactgaattgtcagcattgaactttagacgaatattgtcattaacaaagacggatcccatcttaccgttgccgaaatctgctatcgatgatccggccagttggtaaaagctaatattatttgttccttgaacatattcgtgtctacctttagtagcatttggtccagcattaagactggaaactgttatccaagcattattatcaaaagtgattggattgtcattttcatcaaaaagctgataagttactgaaacaggattaacgcccatgtaccagaaaccttctgtcggatcagtattgatgaaaagtaaaggccaatcagtactattaccgctagtcgaatatttttcaacgatcttagtaatcttatgattattaccatcatcatcagtatatgaactgttttgaagattagtaaaagtggcagtaacactaaaattaccttcattaatattgtttgcaacaaaagcgtactgggttgaaacttccccatatgagttccgacgtgttagcgtccaggggtatttgccccatgacaaatatttagttccactcatatcataagtaaaaccagtctttccactttgatcagcatttcctagattccaaccattggaattatttgttccttgcgcgttactaaatactacttttgccctggattctttgcccaatttcaagccttgattgaccattccagagcttataacattgccatgcattgcaatgttatttttatctaaatacgccgcccaatccttgttgaattttttgagatctgtttgatatttagccagatctttctgatattgctcattttcttgattgtattgtgccaatttttgttgatagtcagtattagctttattgaactcatcgatatttcgtttctgagtagaaaaaggaaaagcactaataaccttgttatatcaataactataggaaatgtttaataggtaaaaaaagcaaaaagatatatgattagccggttatttttgactaagttatctttttgctttttctattttattaagctgttttggggtacttttttaccaatactctttctactcagaaacgaaataacactgattttgaaaatcaaattaaacaatacaaagaaacactcgctaattatcaaaaagatctgacatcatctgtcaaaattgatccacataaagtgatcgaaaatcttagtattaataatgatgcaggagctattggaacagttgattatctacaagcaccatctcaaaaaatcaatgctcctcaagcttcacaaattaaagatttagagggtgctactacttcagtaggaggttactatgaccatgatttgaaaggtgatttccttagagtaacctttacaaactttaactcaaattctacgtatactgatatgaatggtataagtcatcacattggtaaaattattgttacgtattcaaaccttaatctcatacctcaacaaaataggaattcttctcaaagaccagcttttgtagtagcaaccaaatcagttcctggacgtccgtggaatggagttgatacattaagcgtactaggagcagatcaacgttttgatttctatgatgatgctgggaactatattcaatttattcctggaactgcgtggatgccttttggttcactaactcgttcatggtctggtattcatatggatcagtatgacgatgatcatattgaaatggtaaaagctatttcaaatgcaaaactttatgaaattccagggggtaacgctaccttacatagtgatggaaatgtttattcagatccaggttaccgaattcaagaaaaaggtgctgtcaattcacttggaaatgacgggggtgcaggaattgcttcaattcaaaacggggctacattccgactttcaattcaaccttttaatcatagtgaaccacaaggagaacataacggagatactcctgattggaactttttcatcaataatactactgctttagaaggaatttctcttaaggttccagttcgcaaaacgacgtcaacacactatcactacaatacaaaaaagcgaaaccacaaacaagtggcttcgctatgtaattaagtattagatttccttgaaacgtatttccgttcttgctacgagagcatcatctattcctttagcttttttcggatcccaaagtgccatagttactttatatcctcttttgtgtaacaagttaatcattgatttataatgatcacttacttgaggatttttaataaaatccatatcaaaagcaacagttactctttttacatgtaatttttctaaggctggtataaattttctgtaagaagcaacacctgcaaccgctagaaaatcatgaccatatttatttagttcttcctccgaaaagttattagggagttttgcagacgctactaaggcttttaaaccgccttctgttaaccatatagatttttcttggctaatataagtatttatctttgcgtcataaggctttaatttagcaatttcttgccggtatgcaacttgaactggtgtcttgtcagaggatcccatcagcttattagcagatgaaacccaataatatttaccaccatagataggcttaaatattatcctatctttttccaaaacaccacatcttataataatgggcttatcactttttttaggaatttttccataagtaatctctttaccatagggattagctttgttaaaaacttttacatggtatttgttagtcccaaattcaaaataaatcttaacacgccagttttgcggtttctcaataatttttgccttaatcgaaacatgatcgactcgtgtttgaaaacctattatttcattctgcagattataatatggaataagcattccatcagtactgcctgagaatactgggtaagaatacactccaggttcgatatcaaattttttatttcctccatcatatttaaatgaaatatttttttctaatttaattttcttgagataaaatccagggacacctttccatgattctgtggatactccaacgttctctaataaagctttccactgtgagttcacgtagcctttattagatgaagatatgtcaaatttagctgccttaaaaggcgaaatgttatactcttgtattcctttttttgacttgtaaaaggaaccaaaacctcttgtcccatgcaaaagaatctcactaggagtcaatccacggttaataagagcatcatagtgatgtttggccaaaggatatgccaataatacaagtcggtaaagtacatccttttggtcgtcattagcgctagtaacagttaagttgttattaaccttagatggatcaaattcaacttttttgccatcattaatcttaaataaatgccctccagctactttaggcttattatcatcagttgatctcatacaaatcactttagttcctgttgcattaactagacaccaatcggtatgatgacatattggacattgagcgccatcaaacgtaacccagtgaatgttgcaacttttataatcagtgtcaatcattgatgattcatgtaatcctccaggaaattttttatttaataatgttaaatccatactcataaaaacacctccaataaaaaaagcaccataacaattatgatgcctaaatacctaatttatgaaaaaatattttaatacaaaaaaacgaaaaaactgattaccaccggtaaaaaagaacgaaactactaattaactctatagtaaaaaattaaaagtaatacttaatacaagctaattatagcatagaactattttcagaattctgtttttcgaaattaaaggagacattaggatttgccaaagaatctttgaaaatacaatagcagtaattgttgacaacagttgctgctagaaaataaactaaattatgagaacttaacataatattttttaaatgctttttcacagggacccttgtataaataactttatatttactgcttttgtaaactccaaaatcattacttctatgttctatacaatttttgtaactatcattcagatctatataatctattacatttacttttacatcagacatccttataacctccaaatttattatttcatagtaagtttaaaacataaaagtctctgatagtaaaaagctaaaataaattagttattgcttattgttatagatgaagaatgactatatttgttttataattaatttaaagaattctcgaagagattcttgtaaactacatctaattaagagggagtcaccatgctctctcttttttcgtattgtagtgatagtgaatttgagaacgaggcgtaggggtttctggaataattgttgttggtgtcacccacggaccatttccactttctttggtctgatttttaagaagagcatatctaactgtaaagtcagagttttgcaaagaaattaatccggctccgtaatattcattaatacccttattgtcccagctttgaccatcatgggcctggaaatcccaggtaccatctggtccatcattatgattatctgcatacaagctaccatcatcatgggccttaattgacgatccagctaatccatatgctttcccaccattaataatcttagcagtttcagtatttgtaatagtgctgtttaacgaagttacggctaaccaggctgtattattcttaaaatcaatttgctgatttgcctgattataaaacttgtagttaacattagttcctgttgtattaagatatccgaagccgtcggtaggatcggagaaaattattaagccatgtttggtatcacttgcatccgggatatatgttgcaacaatttttgagatatttatttttttaccattttcatccacatagaaagaattttgcaatccagaatattcaactgttaattgcccgctttcacctgaattccaagaatagacaatttgagaattactatctatttttaaatcttttttcatttgggcaaagcttgaagtattagtgccatactctttttcatttgctgcagaatcccagcctcgtggccagaaatatgaatcatcacttttgcccgaagaactaataactttaagttgagcgttaggttctcgaccaagtgttaattgctgctgtacttgatcagagcttaattcattactactaaaattatgatcttgtttccactgatcccattttcgtttctgagtagaaaaaggaaaagcactaataaccttgttatatcaataactataggaaatgtttaataggtaaaaaaagcaaaaagatatatgattagccggttatttttgactaagttatctttttgctttttctattttattaagctgttttggggtacttttttaccaatactctttctactcagaaacaaaagtatgcagattggaaggaaagtgtctctcttaacaaagatggagtaaccatttgggacattaagaataacctgcaacttaatcatgagcctaatgcggccgttaatgtaaaacaattggtcgctgccgatgcaacggctggaaatggtaatgtcctatattacaaaccatcaacacaaacatctggtgattttgttcaagttacttatacgaacttagataacagttacatcattgactctaatggacaaaagcagaaaattgctaagattgtccgtacttttagtgacttagcaaaatcagcatccgctagttctattagcttcaaaaagggaattttaagtaatgattggcgccagccaaatctcgctggagatgatagcacagctttactgattaacactgatccagcgaacggtgctatgtatcttaatgctcttgggataacggtagaagatcattattatgatgaaaatggcaatcaaattgatggtgatggcgggtactatgttctttcatctattaataataacgatggctttgataaccaccacgagcatgttaaagccccaaacaatgatatgagcgctatcgctgttcacggttcgtcagtatctgttcagtcggatggctctctatctagtaatatcggtaatagtctacaagacgttcatagtgatggatcgtactctgattcaaataatactagtacttttaataactgggataatgttagttctgattatttctacttcggttctggattaatgcaatacacatctaatccagggaaacttagattttacacgggaatgagtggggaaaacagtaatgatgatgaaaacgccttttggttcactatcaatactattttgccaaaagttccagtaaatactgaggtacactatcactacaatacatcgcaagcatatcttttaactccgctttaacacttgctctctttctatacatagaaattagtttttttcattttttgacaaaaagtaataataaatagtaactttataattgacataatatctattacgaagctactttagctataatatcatcttacttaaccatagtccaacaccatcaaaacaagtttatttttaatatttaacagcaaataaaaaagacaccttcaatttagagggtgtcctttttacaaatttttactgaggattactaaatactaggcttttcttttacgaattcctaacgaagctaatcctaaactacctgctaaacttacagcagctaatcccataacagcaatattatcctctttgttgcccgtctgtggcatttcagaagaatgactggtcgtttgactaggagccactgaaattggctgagaagcgctaacgggtgctgctgttggttcagcagtacgttgtacagctggagttggcgtagatgctggagttgatgttggagctggcgtttcaggtgtcttaggagttaatttttcttccggagcaggcgttggctttacatagtttgttaccgtattagttggtgtagctttaccaaagccaaattggtaggcggtattagaaaatgatccctcaaactccttgttcaccttcactggtaattgaacctttaacttagaacctgtcttgacatatttatcaaagaattcttgtggatcatctgcttgagcaactacaaatgtaccattaaagcgtcctgctaagtgattatctttaatttgttcctgaataaattcaggggcttgagataaactagtgtacttatggaaggtaattccgttaaccttcttaccatcttgatcaactacttgtgccttactcaaatcatttaccgttaaggcattagtatcaatcggatcagcaaagtagaagccctttttaatcatatcaggagtggtatttacatccttactattagaaagatcccaggtcatttggtaattaatgttttgatcattatctaccttttgtccatcaattttctgtgaagaatcactaagatcctcttttacaggtgctggagcagttgctgtcttaattgaagcttgattagaagtcgtcttaagagttgcatttcctttaccatccttgaagactgtctgctgatcaaacttattaggaataagttttgattcaccattaacttttgtccgtaaatcgataactggcaatgattggctttctgtcttgttagcattatattgctttaagagttgatcatcatcagtgaaagtaagcttttgaccatcctgctttaagtgaacaagattagtaatatcttgtagcttattatccttatctagcaaatatgcattatatcctacaaaagtaagattactatcaagattttctgttatcgtccgagaagtaagatcttcagcacggttagctggtaatggtgaaacactaagtggccatgttacaactgtacctgcttctacaagtgacccagcaatactgttctctgtatcaccttgtacatcatcccctagttcaacatcttttgtggcagtaggcgtaaatgttgagacattaacagtattagatgtcttcttctcggtattctcaccattggcgtccttgtacccccataatgattcaaacttattaggaatagtttttgtagctgcagttgcttttgctactaaatcaataattggtgtcttaaactctgttcccttgtctttgttatatagacctagtagataattgtcatctgtaaaggtaagattttgaccatcttttgtaagcaatacatgattggtaatatcttgaagagtaccattagcatctagcaaatatgctttatagccaacatactccaacccactatctagtgtatctgttacaacatgactagtaatatcttgtgcacgattagcaggtaagccattcttatctgaaagaggataggttacttcggaaccagaagcaattacttgaccgttgatactacttggcgtatcaccctgtacatcatcccctagttcaacatcctttgtaggattttgagtgaatgtttgaatagtggtttccgaaggagttcctggaacatcgttaaccgtaacggttgcaacattcttaaaagtagagccgtttggcacatctttgttaatcgtccaagttggaacaattgtaacggtttggccattggctgttgaaggatccttcaaactaatagtagctagtccttgcttattatcattaatattccattgatcggtaacatcattaccattatcatcagttaccttaaacgtagcagtaccaacatattgagcataatttgagtagttttcagtaattgtgaagttctttaaaccaccctggatatctgcagcaactggtagggtagtcttaattgaagcagttgcaacactaccatctgaaaatacttgatggtccgcaatattagtaccatccgtaaaatgcttatcaacatttggagtgtagttcaccacattgtagtgatatgaagctgtaatttcgttaggcatagatggcttcgaaactttagctgtattgtagtgatagttggctgaagtggtatttagtttgggtaacgtaacagtagccaccggtgcagtttcaccccattcggcccacgctgggtctccataccttggataatcatgctgaatgcttgttccagaacgatcatagattgtgattaagctccaagttccgtctggattctgtatagcatcataactgccatgataatccttaatagcctttacttcttcctgcgtcttattattgtgtgcgtagaaggcaagtgatcctgggaaatatttctcctttaacgagtttccgtctacaccagtggcatctccttgtttcccaaaaggccatcttgttggatctttaactggtgcaggatcaattgcacgtttaatgacataagtgtcccagaaaccgccacctgttttaggtgctaatcctgatggaatcgttaagtgaacgttagttacgacaactttcttacgctgtaagtcgtagtgccatgtaatatcataagttggatgagcattcatgtatccaccattatcccaattaacttgccctgtaacgtgttgatcttttgctaaatcatttaattgagattggtatttagcatagttttgtttctgagtatcgatagctttatggatctcatcaccttgagactgataattcttttgagtgttagtagcccaattttttagccccgtcgtatcttctgcatcaaatgaactatcagtatctgaatccttaacaacagttaatccaggaatattttgagcatccttgacatcttgatcaagttgtctagtgtctccgtgagtctcattataagtttgataatttgactgttgcattgcactacgctttgcttcatcttgtcgttgctttaaatactgttgttgttgattataatcatcctgaatcttttgatcgatttctgcttgagaactaccagtgatagtttgatctggatcttgtgtaacactaagatgtggcgtgttttgtacactttgcaccgcttgatcgatttggtccttatgtggataggttgtaatcgtttcttgatttccattaccacttgcttgagtagtagccacctgtggttgatctgacgttgtagtatcagcgtgtgcagtcgaagctacactagttgcacctaatgcaacaagggcaacagcactagcaaagagccattgcttcccttttttgtacattttgaaattagtttgagcagagtttactgcttcaattttatttctcatttcaaaagttcctcctcaataaaaatttgtatttatcaatacaacattgattattgccggaacgtcaagacttatgttgcattattcaagtatcaaaaaaatgagaattctacttcctgcttatctgagttttttggtaaaaagtctttttgttaagggggcgatagcctactagaataaaagattttaattttactaagtttatttattgttatcactttatgtacttttaggaggaattcttacaaatggttagaaaaagatacagcacaaaattattttacaaatattacatgcagtggattcgcttatacaaagaagacgcaattcgccccgtcactctagagaagtattatttaacttaccgaatgcttcgaaaattggcacctgacctgcatctaaacgaattagaccgacgtacttatcaagcaattctgaacaagtatgcccttactcatgagcgcaaaaccgtaatggactttcatcaccatcttaaagctagtctagtcgatgctgtagatgatggaattattgaacgtgatccttctaggcgagtaattattaaaggtcagaaacaatcatccaagaagacgaaatttttaagtttatatcagctccaacaattacttaggcaacttgatcttggcccaaaaattagttgggattggtttatcttattggtttcaaagacagggcttaggtatgcagaagcgctagctttaacacccaaagactttaactttcaaaaatcggaaataacaatcaataaatcttgggactataagagtaaagtaggccattttcagcccacaaaaaacaaatcatctaatcgtgtcgttatcattgattggcgcactgcaaatcaatttaaacctttaatagctgaattagatcctgatcaaccaatctttgttccagagcacaaacgtgtttttaactcaactattaattccaaacttaatcagtattgtcgccgggcagggattccagttatatcaatacacggattaagacatactcatgcatccctattactatttgaaggagtctctatcgcaagcgtagctaaacgtcttggtcatgcaaatacgataacaactcaacaaacataccttcatatcatccaagaacttgaaaataaagataatgacaaagtaatgcaacatttatcaaaacttgattcataaatcgaataggagataactgattagttcaattatcaacctctcatatcaccgtacgtacggttccgtatacggcggttcgacaacttaatcacattgaattgactggagcgtcttggacatattcataagtccgagttgttccagttttctattagttagagaatagctcagggtcttagtgtatactttcggttttccaaaactatcctcgacaagcggtcagcttgttgttctgttttctgcgattgtcgcacctgattacaccttcgatataagttacaagttactgtcgttcagtccatcatctgattactcaaactactatgacctcggctgactcctgacttactcaacgatacatcactgcaccgcttgcttctgtggaattttatcttattcctcttgtcggaaacgtgtaggccagatctacccggataaggatattaactttcgtcccatgtcaccgttagctttactaagagtagcttcgagaagtattggacttcagcttgtttcgcaaccttatccagttacccacagccttatagctacttcttgttcattggtgcaatacttttccttagacttccttctcacgacggacacccttgtcctcagctcatggttccagctactacggcccatggtgggctttcaccgcctagctaatacccatgcctggcgtacaaaaaaagaggaactacaaatatgtagctcctctttctcgtaggaaagggggatactccctcctacaatcaacttgtcatcgcattagaacaacaagcgaaatccaattgtcatctatcacataattggtctacttatgatggatgacaaagatagtataacataaagataagaaatatacagcttaatcctttatataacaagcgtttatcttattccataactggaactaaatttttttaccgttgttcaaatattcgcttcagtttggctaaaacacttagtttaggcttagttacaacagcactttcatcccctttttcatcatagatagccagtttcttttttaagagcttgttttccagttttagtttgtcattatctacctgcaagtacttataattctgatatagatcatttgaaattgtaactgttccttgatttttcttatcctggttaatctggtttttctctggatgaaaaaaatctactggagatacgctttttttgttagatagatagttgcgcagttcttctacttcactaatcaatgtcacaacttggggatacgtcatttctactgtctgtatattttttttagtattaatcaccatcaaaattttattaaagtccgattcaacctgaaatgatataggcgtaatagtactattcattttgtaattcactccctttttattcacaagataaatatcagttgttcttgcatcccttcattggcattcatcttttgttttttatttcaatatgattatgacaccaatattaagataattacctgaataccaacaatcattatgattattgaccatgctattgctgcctgccacgcttctttaaggtcgccatcaattttatcctctatttgattacgctgttttgtttccgttaaggtatttcttgctaactcactcatcattgcttcaatttgttgggtctttatctgcttatccaatgaaattttaattaatggttttccacgtaagaattcccaaccataccccaaagtacccaaatacttggaatactctaacagtctttggaaaatcttgctttttttccgttggtaaggatatatatacgtatccccctagaattaacataatgaatagcatgacggctgatagtaacctaactttaacgacagtattaaaatttgcgggtccaaagtccttattaataatttcatcagtaagaatggtgcctttttttattatttagctagaataattggtgctaaagcatttacttttaaatattttccttcaaatttaataactttatcatatcttgtactcatcataatcttcctttctttacaagacgtaactaataattactcataatctttttgtaccgctcatagaacattcccggcgcaatttctaatggcacatcaatatcggctccatcaatatcatttaatagtccattcagattgatactttgagaagcaagtctagcaatctctctatcttttaaattaagttgtagtgcctgtttcttcatttcagctcgttgtatattatgaagacaattccatctaattgaagcaactgaattcatatatttaactaggccagttagtttttcacccatcaatctaacagaaggcttctgcattgttaagtcaattaatgctgtatcagttgaatccaagtctgacaatatttcagcatttgctagtaataaaccatattttttagagaagaatcgcctctgaactttatatactttacatttagaattgaaacgattctgcttaatatcccaataattattgttcttgtaccaatgaaggtaaacttcaaatccttgccataaatttgtatcaagatctatttcttgattacgacttcctacaattagttccaaatcagtgtttttataccattgtttaaatttttctggagtaatcatatttatattatttcctttaaaatattgtattttgccacacagatttaagtaagaaacacgttactgtattcttatcttatgacacagtattaagctaatcaccaggatgccaatgatcattatgaatattgaccatgctattgctgcctgccacgcctctttaaggtcgtcatcgattttatcttctatttgtttattactttgttgggtcgtcatctgcttacccagtgatgttttaattagcggtttcccaattaaaaatcttattacacaagtaacaattccaaaccctaccccaatgtatccaagtacttggaaggatttagcagtctttggaagatctgcttttattccgttgataagtatatataaggcccaccctagaattaacatataaaatagcatgactgttgatagtaaccgctctttaatttttctattcttcatttttactcaccacgcgtttagttcctaaaactacatatctctctttctgtttgtaagatgtaattgcaatatagataatctttcgtactaatagtctgccaatatattgaccatttttatattcatgattttacaacatcttgacactttcttagagttttagaatatattaatgaactacttcctgttttagaaggaatggaaattgctaaagtaattaccaataattttcttcctctttgaattttagcttgtatttgacagatggctgatattgttgaagtacttcgcctaatcttcttgccttatttttatcataaaatgtttcttccaatcgccgtcttctttttttctgtagcttattttggaataacttcttaaacattcttatcacctcatctacattttcagaaaagcaaaacattcttattcgttattaaacactggcgaactagggggtgttggtactctcatctctgaatcaactattgcatttccattgctgtagtcaaaaatatatcctggctgtacattgaaaatataaacgttaaaatccaaggatctgtcagttgagactgcctgtaggtttacccctcgcgccatcaactcattaccacgaaatataggagtaacctgatatataactttatggccattctcaattgcttttcgtaccttagcttcgtagattgtctgtaatttctgattactaaaagctgtttgtgtgaacagattcttaggattattttggtctcctgaagtactattagggtcataattaccatcttgattaataccggcagatatcgaataagcaatcatatggccccgattatagatctgaacccttccatgattattatgccaagctgttggatcaactgtttgtcgtactcgaagctcctcatttgctcgattatgttcttctaggaatccggtgttaggggatgatgttctattcaatttatccaaagcagaatagataaccttgttggaattccaagaattaggattcaaagtggacctaccattgtttacttgaattattgcagattgtcctgattgaaaatttttggtagctaattcatcgatttgcgtttgtgtaatcccaccgtaatcattagttgcagttgaactcaaatttgttgactgtccactatcccgaggatttaatgctgaattattgctttgttcactaaccaaagaagatgaattacgactattaggttgagttaatggattcggccgattaacacatcctgttaaaagaacaccaagaactgctataggttctaaaattttccataaatgtgtccttttcatttttcatcgctcttcccttttgcgaacaacgatggcgaaaaatgaaataggtcagctaatgcgttaagttcctgtgtagttggtcgtacctttaaactttcaatctcttctacacgattagcattaactaatccatctgttttgtcttgaatatccctataactgtactgttcatgctgcctcattagttttaaattaagcgcaaatatatttctcttattcacttattccacctcactttaaaattaactttatcatcatgacggggtttatcggcaattacttaataatttcccattttcacattttttgagcagaattcttttcatcttccttaccccctacaatcaaaatgattacaagttaggaggaataataattatggcaaagcatagttggctacacttttttaaaattcaaccaaaggatggtaataagagtactaagaataacaaaaaagaaattaaagctgaaaaaaaagaaaaacaatctaataaagcagtgaatgagcaagtacaatcatctacttctcaatcacaacagagttctgatcagcagcctaaaatcgatgtaatacaaaatgaagtacctgcatcccctaatactggtgttattttagatgcctctgagcaaccacaagacacatcaacatcaagtaaagaaacgagattaaaaaagaaggagcaatttaatgctccttccgttctggctaaaccaatcattatccaatttttatatcaaaagaaaaaaattgctaacgattatatttttactggcgaaattggtcaagctttagaccttactaaaattcctgctgttactggttatgatttaccagatgctaacaaattaaattactctgttacagatcatacgcaggtagtcccaattgagatgaggccacaacttattcattatcgactagttccagtaaccgaagatcgagaagttattgataagaaatacataaaatctctcaatggtcaacctggtgagtcaattgtctttagcaactttccacagattcctgggtatcaagcatataccactcgaatttatattgttcccgataaatcggatgatcttcagattacttatgcacctgtacaacagtctttgacggtagtctttatcactacttcaggagtaactttaggagaacaaactcttcacggcaagactggcgatccttatcgcattagcactaaagaacatcatttcgaaggatataccctaagtaaagatgatctaccgactaatcttgaaggtaattttgaaccagggaatcagatcgtaacgcttaaatacaaaccagttgagtctggtgtaacaatttcttttattgatgaacgaggtaacgctattcataaaccacttactttccctggcgcttacggtgagtcctatcacttaaataatttaccacctattgatgggtataaattattttcagatccaacactgctaattggtaaatttgatgttaaaatgcaacaaattgtactcaagtatcagcgtgcagaacaaaaagttaaagttcgtttctggtttgacgaaaagcatacagttagtgcaggagaagataaaatccttaccggtctaacagatgactcttataaaatgcaagtacccgttcttgatggttatcaccctagtacacagatcattagtggtcggtttaaggtttttagcaaaaaaatttttgatattgtctaccagccaattaaaacagtcattaaactatcactccaggatgagggaggccgacaacttcctaatgttcaatctttgacaaagactggagtctacggtgaaagttatacctttgatctgccggatatttcaggttatgtacggccacaagaaaaaattagcggcaaattttatcgcccccaagataccattatcgttaattatcgtccaaaacaagcaacattaacaattaactatcttgattctcgtacaaaaaagccaattccaaattacaacagcgaaacaattaatggcctagttggtactgcttattcaattgagccaaaaatgatcaatgggttcaaactaactgaactacctaaagaggcttctggcgtttataaacgggctcaagatgttgttaatttcctttaccaccctaatccggcgaaaatcatcattcaccaagtcgatcaggctaataacaccttatttgagccttttgagctcaagggttactttggtgatccatacaacattaaaccagacgaactaaagggctatgcatttgaaagctccagcgataagctttctggcgtttatcctgaaacacctaaagatatctacctctattacaaagcagaagtgatttcattcacccttgctcctgccaatcaaatggataaagttattgataaaaaatacaacttaaccatctccggaatggttggtcaacagttttctaacggacttccagaaattcctgggtattcacctaagaatgctaacagaaatatcggtgggactataaaatccgctatggctgataagattctcttaattgagtatgagcctgatgatgcacaagcaattattcactttgcttgtgctggtggacctcgtgatggatcaacaccgtttgaagactaccctcttaacggcaaggtggctgaacaattcaaatatactcttccagaaattcctgggtatcacacaaatactcctgtccttacaggtacatttactcccgaaacaattgatcttaatgtagtttatgaagttaaccaaatcacatacagcattcattacgtcactgatcaaggccaagagattttcacaactgcaccaacaaaggcttcttatggacaaacattagatgttatgccaagcctaccagaaggttatcacttaccttctggatccagtaatgaaattgtgctgaataataactccgattacaatattgtaattagtccagacagtatcattgctgaagtaatcgctaaaactaaagatggtaaagagcttaactatcgtcgacaaatcaatggtttctaccatcaacctcaaactttcccagcgccacatctcaatggttatcaacctgttgatgggaatgagttgacgattaattttgaattaggtcaaaaagaaattccggttatttatgagccagaaaaacggtctattactgttcgttacattgatacacaaggtaataatctctcagatccaactgttatctcaggctacttcgatgaaccttataagattgaagccaagaagtttgctggatttgttgttattaatcaagatagcactagaactggtaaatttggtctcaataacagcgatacaaccttcatctaccgcgctggtagcgatgaaattaacccagctattactccattagacgatatgctcatcaacaaggaagttgatgctgacactaattatcaagcagtagctgaagataattcaaataactcagataatacagccaatcaaaatacaacgattgacaccccagataacttattttctgtaaatcagggaagcaatgtaggaatggatgaccttattgatccgacttctgctaattccactgatccaaatgggactattagccgtattattcatggtagaaattaggtcgtgattacaatgcacttaatgtcaattaacggaagagagtttaattgtagctcattagcaagacactacaatcttccatacaacactgtcttgaaactatatcgtcaaggtttccgtaacgaagaactaattgaagaatcaaagagaatacaacagttacacgggccagtcattgtgaatggaaaatggtatccttctcgcaatgctgctgcaaaagcactaaaagtaccgaaaacaacattttatcgaaaacacaaatcataattaaaaagcggaaagaaatataagtctttccgctttttgtgttgctgtatcaaaaacggaagaaaattttagttccatttatgaaatgtcatctatgtatgccgcatacgcatttgcattactttttactggttctttttttcctttgcttaactattttctctattttaaagtactacaacctacctttttgtttttcctttaatatttgaatcaaatcttatggaggaaataaagcgtgaaaacaattagatctgcattagcaaagcacaaaattatcgcaatttcagtcattagttttttcctgctaattgtcttaattgtcattattattggtggcggtactcaagattgtagtaatggagacagtggcggagctagtggtaactggcaatggccatttgacggagttaaagatcctcctcaatcacttgatggaggacaatttggtgatagtgccgcctcctcttccgttcgcggtcactcatttcatgatggttttgactggtcctttggacttaacggggttcattctggatcaactgtaaaggctgttcacgatgggaccgttacgaaggttggctatgcagcgggactcgatacatacgtatgggttcactcagatgatggctacaacgaagtttaccaagaaaccttttcaccaagcgacgtaaaagtaaagcaaggtgatcatgttaatgctggtgatactatcggtactgcacatcttaatggtcatatgcacttagggattactaaagaaagtgatttcggtaaagctgagtctaaagccttcaccaacgatggaacatggttggatcccgttaaaactatcgaagatggtatgaagagtggcggtggcaactcaagcaacagttctggtagcggcggctccggcggtggcgattggacgcaaaaaggatcccaaggttataaaaatgcccaagcgatctttgatactacaactaaaactgatgggttttctggtgctggtggagcaggtgcagttggaaatggtatcggtgaatcaggattacgtactgacgtagttaacgcttatggttatgggggtcttttccaatggtctgcttctcgcttctctggctccggtggtggtcatgttaaggttggtgataaatcaacgtacacattagagaatgaattagctactatgcaatcagaacttaatggagcttacaagaaagtaaagaactctgttggacgtgctacagatgttcatacggcaacttataactggtttatcgattacgaagggatggctggcaacgaaaatcaatacggtacacaacgggatcctggggctcaatgggcttataaagaattcggtggagctaatatcaaagctaatgactccctgctaggtgccgctgctaatggtgctgccataggtggtgctggtagtgctacagagcaagattgtgatagtagtagtactgatgctggttctgccgatggcaatattgttgacgttgctaaaagtctccttggctatttccactatggtctagtacacggtgaatcaaacattggctcggttgatcatcccaacaaaaatggagttacagactgttctggatttgtatggcttacgcttaccaaggctggttacaaaacacctgctaacatgggatggttcaccggtagtatggctgctgatgcaaaaggttcccaccagtggttacaacaaattgatccgaaggacgcaaaagctggtgatattatcatctgtaatattggcaatggtgctggtagtgctggacatacagctattcttgaagaagcttggcatggggccgacactaaaattatccaagaaggtggtactggtggtagcggtggtgtaaatgagtcaaccgttggcccatcatttagctatctctttaccaacggagaaaccgttcttgctcgaccaatcaagaaataatgttaagggggatcataatgcattcgaattttaaaaaatactttaaatcacagtttaaaaaagttctctatctttttatcggggttgctattcttttcatcttagtacctgttggtttatggggataccaacgttatcaagataatcataccaagccacaggtaacagatgaaaatggacatccccaaactactattcttcataaaaatcaaactccaaatggtaaaaagagaaaaaaagttcccattaaatctgtttcagaaaaagcagcaacgaagaacgttaaaaatagtattcaaataggactcaaaattatctctgataataaaatcacagctggtcaaaatataaatatctcaaatctcaataaaaaagatactaaacagctctatcgatcatttcaaaacgggagcgtagtacaacagtttaatgatatcgttaactactctactcctaaggggtatgtacagtggggagacgctggatctaagtctacagatacttcaataaaaactccgaaaccaggggataaatatgttcttgatggaggcgatattcaccttacatcttcaaacgttgagaattactttttcaaagtcaatcttacttatcatgccggagatcaaccacagagaacaattccattaaaattaaccgttaatcgaattgccggtcagatcactaatgtaaaaagaattggagaagttaagattactaactaaaatccacaaaaatataatatataataaataacatataatatattatttattataaaaagaagggatccttttgaaacatagaaaagaacgatattatattgctaaaaatggtactaaaagtaagctagatccaacaaaaatccttttattcctaataggattgttaattttgagtattctcgcgtgtctagttgttaatgtgggaaacgctagaaaaaactattatactcagaaagcagaattggacagccttcgcgataaacagcataatttaaaagctgtcggtgataaaatcaccgaaggtaagtttaatctcgttgctaatgaacaagaactgggaaaaaattaccaggaattaatccaaaatgcatatggtaattgccataatattaaagacctacagaatctaaagccacagataattaaatatcttggtcaaagtggatatcggcaggtgcatgaacagattgtcactactagtgacggcaaacaggttcttattccttctaacaatgaggaagtacatgtaggtttttctaattacgactcatcaaataacaccattgatgttaccgtctgttcgatttataacgctaaaagttatggagtacagggaaataataacaaaatgactagaactattatttacatcaacactgtctatagttttgcaaccaaaagtgccaaccaaaccagtatacaaactgctagtctaggtactaataaatgatcggaggaaagaaacatgcacgagtatatctggcataaaaatgacaaacgttggctagcgattttgacagtagccgttgttagctgttggcttatactagctattaaatctagtattgctagcaattacaatcgcaagacggaacttatagcccagcaaaatttagtactcaaacaacaaatcaagcaaaagcaaaatagtctaaattaccaaatgcaaaaaaaggctgttaatagttccaatttagagattcgtaatagcgtacgtacaattatcggcactaatgaagcaattaatatttctaataaagcctttactacgctcaatacctacagcaatgggaaacaatatcgtaacaatcaaaaaacagtaaaaccatattttgatactaatacattaaaaaatcagcaactattcaagaaagataaagatgtaactggatactcctatattgatgcctcaaaccttaaatcaaaaagtgtttctgttgagacctctgctggagtcattaacaatgatcatttaccgttaattattaaaaccatctttaatcagaatcaatttaataaagatcatggtcaaactcaactggttatgatggcagattacaactataagacaaagaaaatcggtaatgtaaaattcattggaattttatatcaaggagcaatcgataattaattcccctcagaagctactctaagctaattcatttcatttttcgataatttccacgtaaaccaaaataagctctcagaaacgttctgagagcttattttagttatttttaaaagaattacgattttttatacgttgttttagcttatcaacatcaatctcaccagagtttttatatgcatttttataccattttacctcctcagagtcttcaccaaattgattaattaacaatttaagagccccctcagtatcagtaccgatatctttttcattaattccatgttccatcaaatagttgctaaccgttagccatattggttttttctcttctatgcgatgatgatcaccccttttatgactcccacttgaagattttctcgttttagggtgctttcgtttctcaatataactataaatagctttagatagatatttgacaatgtgatccggcttttttttcatattttgtgcaacataatgaagatgattatctagctcattaatttgcgcattctttagaaactcatcataaatcggatataacgtaccaaccaaagtaccacggtacttttcatctgtagtaactttattcatgtctagaaggccagaaccaataagtaattgcgaataccggttttgcaagaagtcagtcaatgatattttaaccgtctttggcttggtatcccctactaaccgctctacatccttacgcataatatgaaattttaacgctgtcactctacggccttgcttaatacgatcataagtaatgttgtactttgtatatttcgttatctctttagtaattggatcaaggacatagcgccttacgtcatagaaatcagtatactttttttcagttcctgttagtttacgtaactcatcaacagtaatttccggattagcatacttatcaatctgtgccatacgtcgcgtcccactattaacataatactcgtactgccgataattcatcgtaaaccaccgatacattgataccgcgtacttatttttcaaatgaagaatatcgtttaactgatattgtgtaaaattttctttcaagtcagtgataaatggaaggatttctggtgcaaacttaatagttgcataatccgaactgtagttgttgtcagcgtagtagattggtgtaattccaatatcgtgaacttcaccattacgttctgtcgtaaattcaaaatttgaattcttacgcaaggtattaagagccttggacagttgttgatttctacttgtccccttaatacccaacgcattataaatctgttttttattaatatggacttcatgtgaaggctctttttgtcgcgaatccattgcactaactgcaatttcaaacaattttaacgatagactggtcatgtttgcagtgcttttaattagatcgttatgctcagagacaatacgattatccaatttattaacaaccggaataacttccgccttcttttcgtcttttttaggcatattctttcctcaaattcttttaatcaatcgaattcattatatcacattaccggaagatatatagtttttttccgccacttcttggcctagctaaaattttcttccggttttaggtttagaatcatcaatttgctaaattttcttccgcagtttgtaatataccctaaattttcttccggtttttcttaaaatattagtaattctcaaaatcaaaaaaatagtgatgataatgttcatttaaattcacgctaaatttctttccgcttttttgctaaattttcttccggtttttcttttaactacaattacggaaggaaattttcttccggttttaaaatttccttccggttttcgctaaattttcttccggttcaaataaattttcttccggttcaaataaattcttttccggttttaatggacttaaatcccgctataccaaggttatagaaagttacaaactctttaaactctttaaactctttaaacttttgatatataaggtaccacacccaataatcaattttttaagaatataagtgacttacttttacatacttttctcaattaagataacaatgaaagctgaggtaaaggaaatgcaggatttatcatccaccataatactcacattaacttatctgttcttagttttagcaattccggttagtgcagtatttggattaacttatattaaccgaaatactaagcaattattagtaaactatttcggtgaacgatctcaaatatactgtggtggactaggcataattatacatgaattaagtcattttcttattgctttgctctttggccaccaaattactagtttcaaattattaataatgccctggaatctgaatgaagaagatgggtcccttgggtatgttaatcattcatgggataacaatagcttatatcagagtattggtaatgtatttatcggtactgctccgatttggggttgtactggagcattaattctaactactaaatattttgctaattcgctatatcagtcatttactagtgccattgaaagttacgggacaattagttcacttaaactcaatgttctacaactatttactcacctaacccttggtccgtttacttttcaaaacattattatgttattaatctgggggattctttcggtaaacattacagtaggaggtttcgatttaagtaacgctgatttaaaaggttcattttcatcgtttattttaacgtatgctattttgacagtaattctctttattttagtatattgtggcttttcgatgcttattagttattggttatatcggggatgcgcttggttctccttgataatgcttatctcctttctatggtcattattttctaatctcatcttacgcctcatattatttattcaagaaaaattcgggagtgaagatatttgaatactgcagatatattaattaattgcacattcattgctttagcagtcaatgagttctttatgctagaaataattattaatgcattacttcaacacagggatcttaatcgatgggtaaccactaattggaaattgcctcttttagttagtttcttgtttgcaagttgcgctcttatattcattcaaacaagcaggcatgataattatatttatttggtaagtcttttctgtaccattgtacaaactttactaatgctagactaccatcgcatgctaaagcgatatattaccagttcttggtatttactatcaacgaaaattaactggattattggtgtcatctgcatcttattaattatcacctgtattttatatggattaattgtaatagatttcaattagggaggtctcctatggcacttatgagtcgaaataataatattcacaaagaagaatttatggaagattatcggcatgatatttttatcatgctcctttcgatgggagttgatcgatcagcagcaattgcattaattaaaactagtaaaaatgatattgaaatatgggcaggcagtcgtccggcaactgggagcattgttactccacagatggctgcaagaatgatcgtgcgtgcatcaaatcttaatatagaaagtggtctctaaataaaaagctatatttttctcgttttcccctccccttttggtatatccttagagcaagaattatttgatactgtgaggaggaagcaattatgaacgaagcagtagagaaatacttggctggttatcacccaattacggctagcccacgtaaaagaatttatactagtcgaattgcttgtaaacgagatgaaaaagaaattaaatttatgaaggattacgctaaaaagcatgaacagccagttatctttcatcatgaagaggacacttatctatactaaaaataaaagagatgcatctaacctaatagttagttgcatctctttttaagtttgaaatttaatgagaggaatgcgttaccatgtttgataatgtaaaagaaaaaattgataaacgttttgaagcctacattgatcaactaaatgagtcgtcaattgatgatctacttccccgctttgagaagatagtaaaaatattatgggctatcccaatatttctatggagtttgtgtctaattttaactatctttccgtttcataccttgaatcatagtttcttgttaatttggattggtggagtggcagggatgatacttagttttttagcaaatcgaatgttaatgaatttgacaacgcggagaactgatattgatcaggatcatcgggtagaagaattactaggccaaaagaagacgatggattaccaagtagcaatcacttttggtggcctaactgcccttccatttgtttatacagctattccttatacccagttcttgttggataatccgactattcctggtgtaaatcggcaaatggtagaacttattgctggcccaggtctttttaataatattatatggactttagctcctattctttttactgtttatatgctctctcggcttagaaaaagtgagatggaacatcaaaaagaggtagaaacatggatgtctaaatatgagtaccataatgttaaactccataaagttctcaatggtgatgaatctagtgatcatgagcctaatattgttcttggaacatctcttgaaacgggtgatttcgttgttcaaaatagttctactaggagacaaaacactgtagcatatggaccaattggctgtggtaaaacatcacggtttttcttgcctcagattagacaagatatagatagttatctacagtacattcggtattataaaaaagcttctcaacaagaggggtggatgaaagcctatggggatgcgactcactatcttaatggctttaatgttatcgacccgacaaatgatttatgcaaggaagtttatacattatgtatgaagctcggtgtgcctagagataaggtgatttggctagacccagaaaatccacgaacccctggactgaatttacttcgaggacctgttgagaaagctgcagaaaatgttacgaatattattgcagggttaacctctagtaataatgatttcttcaaacaatctgagcgaacacacctcaagaatatgatttatctcttaaagttaacgtcagttatggaagacaaaatagctagctttggtgatttaattgagatgtataacgatattgaattagtttgggataagatggaaattcttgatgagtactgttctgaattaaaacagcgtgctgaacaagcaaggcaacaatatgatgatgataatagtgacgataataaaattgcttttgaagaactagatgataagtatgcagttgcttggcaaacatctcaatggtttcacaagaatatccaagaagttacagtcggtaagaatgtccgtctctacgcttcaggaccccatcaaggtaaaccaatgcattacgatgcgcaagacgaatttgtccatggcctcttaaatcagctaggtgatatttctaaaaatatcccaattcgtcgggtcctttttcgagattctggagattttaatctcgatgatttcttgtataacggtgggattctcctttgtaatacagctaaagcggttgttggagatcagctagctgaaactttaggacaaatctacaccttatcatttcaagcagctacttatcgtcgagatcctaattgtcctcctctgcatccactatatgctgatgagtttccagactatctttctgaatcgttttcgggttttgcttcacaagctcgtaagtacaatgtacctatagaaatagttgcacaatctcctgctcagcttgcgtataaatatggtgatgattatttcaaaacattaatgtctgttatgctcacgcgggttacgtttggtgatttaggggcgaatgatgcagaggaattatctccctacttcggtgaacatgaagagactacagaatctttgaataatcaagaggtcgatttagccgcggatcaagatagtaaccgtcaaatgattagtgctcgtcgagaactggttcctaatataactgcaagtgagattatggggctagagcgatttacaatggcggttagaacgccaggtcaacatggttctgatatgtttaatcgggtacggactaaaagagtttcagatgagcaattaaacgatgatccatacaaatttgatatgactaacgatgaagaccgggagtcatatgaatatatgctagaacatgaagttcatgataatccagactttgacgaaattgataaatcaattatgaaagaaataaaaaagcgtccaaaagaggagaacggatcaactactacatcaatcaataatgaaagtaatagtaatgactcgacgtattttgatatcgatgatgccgatgatgaaatcagtcgctcactcgtcaataacggtggacataagactgttaaggatataaaacaaaaaaatgatctaggattgcttagaagtaataagaagagttctgagggtgaattaggacatgatgagtttcctcaccctaatatcaaatttgttgattttgatgccgatgatgatatcagtgtaccgagtcataaagataagattaatgaaagggatgaaaagtgatgatgtacttagatgcttataacaatcttattgttgataaagaagatcgatttattatggaacaggatcgcaagaaacgatatgagtctagtggagatgagttaagaaaacaagcacttaaagattttgaaaaagattggaaaaagattcttaataatgtaactattaatgattatgaaaaattaacagatttaagaaagttaagaaaggaaagatatcccctactcaaagctttatacccaagtagtgttgatacagtactggataaaacaatcgaccggattattgaaaaacagctagtaaaatttaaaaagaaccacagtattgtacatggtaatgatgattacattaaaatcagacagaaaacaaaagaaacaggaaagattaatgacataagtacagaattaaaaaacttagttaataaaatggatttttataaataatatataataaataacatgtaatatattatttattatatattacatgttttaagaaagtgtggatatgatatggctcttgaaacggttattttcgctcccaaaatactaaatagatttgataatcaacttatagcaacactatttaataatgatgagtctgaagaaaaaattattgtttcttctcggacctgttatcttcaagaaaaggggattatcaacctcggaaataatgaacaattattaaaaaaaatagttatacaatttcccagtaagcttgagaatctcatcaaaagctatctgtctttgaatattagtaagcgttatgctctgtctttccagaatctaaaagcaacaattctgttgatagaggaaattgctaattcacaaggatttaaacaagataatgctcctcttcacgctctagcctttttatgtagtaaatcgcaaaaagcgttactcacatttataagaggttatcaagttgaaggaaataataaggaatatctcaatgcttatctaggagaaattgttcatcatgttgattcttttcaaaatattttagaatttttgtggaaaatacatggagtaaattatgtaagagaagataagcaaataccattcagtgataaagagattgtgtttattaatgcttcaaaaatagatgataatttttattatcaagtatatcttttattttttagcaaacaaaaaagtcagattttttttgatcaacatgtaaatgaagaatataggtctcgtttttacaatacgaaaggtaaaatttacattaatagtgggatcttagactctcagatagatatcaactacgatctaaagaatttaagcgatatttactactcattggagcttagtgatcctgcatttttattacgtttgttttctatgacaaaattaaaaaagattcttgatcttacatttaacgatattaaattagctttattcacaaaaccaatatatatgttaaaagatagatatatacgaattcgactgcaagaaaacgtagttgaaataataaaagttaaggatggaaaattaatttctaattctattagccttatagaattttttaacagcttatcgaaaaaagaatatcatcaaaccaaggatgatagggtaatagacaatggaaatgaagctatgacaggtgaatttggtgattacggggcatcagctccagagttaaatggagacggttggtataatggttaagatttgacagcaaataattatttattatatattatatatgataaataatatgttacatattatttatcaacaaaggcaatacactttaagtttttcgtatagaacggtctacactacacgaaaaggattaacttaacgtattagaaagcgaaatccagttgtaagtcacaaagggtctacaattaaattagctgcaagtaaaatccaatgtgtattgtttttttgaaaagaaatatttctttcaaaggagcatctagctaggtactccttcttttttacggttaatcttatcgaatagtaccttattatatcttttagatattaaatagtatatatttgttattaattagtttctttttgataacaaatatattaaatatataaaagccgtgttatacaaatgatagcaattattatcatttgtataacacggctttgttttagtcagtagtatattctattattttggaattacaggtaaaaattcaatatagtattgagttaattgattattgttgaaaacaaatgaacttaattgtttaaaacagtctgctaactttttaatatcggtatctttatatacaaaagtataattatttttaatcaagtattgttttactttttcactatcgtcagcggaaagcatttttggcgaagcaatttgcatttgagttccatctctaaacattaatataacatctaaattttcaccgatagttgcaaaacctaataaatgaaagaacattgaatcaagtggaatataactttcagatccgtcagttaggtctataacatttatctctttaattggaagtttatcgattgcagctcttagttttacatgaacttgtgttttttcaacaaaagtagctgcatttgcggctttctgaatcttattgtaaacatcttcatttttattttcttctaactttttttcgactggtttatgatgcataattgtgtctttgatatctggcatttgttctgtcttctccttttttaacttcatttgtgcggcatttttttcttcagcttgtactgtatgctgtatcctgaaagttttattcggtacagatacctctgagtcagtttttttattaatatctctctgctgaattggagttggttcaccagttatgacttccaaagttggatgcggctttgtttttttggataatctttcggagcccagatttgtgtctaaattgatttctcctactttactgttcatattaaccttttcaatctttggactattttttttattatgtcttgtcgacgctctgccattatttatttgggatgatactatcgtcttatccttgaccgattgagatttggatattaggttgttttctttagaatgattgttgctattgttaaaattctgaagtgttttctcttttttaatatgttttttcttttcttcagatgaattatagcgagtaacaacaaggtgttcttctttcggtttgggcatgtggttgtgaatcaaatcaaataaattactatccgcatacttatttatctttgatcgggatattactgccataattgccctgccctcctttctttctatcgctatcatagcagtttgatttcttgattttcccattacttaaatagtttaaaaattgtattttttcttgcttataatttaagtgaatattaaagaaagggttgatcacagatgaattcaccaatacatcttattgctgcacatgatggaggcaatggatatatgaaggatgctatagatgggaagcgatatatttttccatctataatgtccactgttattgataatgcaaataataaaatcaataaaaaagataagaatgctatttctagtttgcttaataattttcaagaaaatatggacgttacactacaaagtaatgggattaaaaaaaatggtagatatcttgttggaaatagtgctaatacgagcaataacatagttttaggctttaatgtaaatagcaatgagggtaagtcaagttcagatataagtattatctgtttactgacgttacttgcttatactagcttaaataaattttattcaaaaaatggagaattacctgagaatttaactgttgaagtcgataaaatggttaccgcacttcctatcgatgaaataaagatacccggagaacgtgaaaaatatataaatcgttttctccaccaacatatagttactattaataactttagtactccaattcaatgtgtaattaactttaataaagttgatgttcagccagaaggtgttattggtcaatatggattaataggtgacccccataacataaataattaccgtaacgatgatatttttaatgatttaaagaaaaaatacggatttaaaaaatttactggtgagaatatcgagaaaataggaccagttatttctattgatattggtgatgggactattgacttttcagttttgaacggtgtttctccggtaccacgaattaattcaagtgttttacttggtgttggaaatatagtggaagaagcagttatgaatttacgacaaaagtaccctacctacgggcaacttaatcgacaaaatttcatgaaaattgcattacgtggtggcgataaagaaagtgctgcctttttatcatttattgataagcctatcatcctgttggaacagcagattgaggagaaagtaaaatcaatatttgctaaattaagtaatcaagtaggactaattgtgattagtggcggtggatccccattagtaaagaaatattatgaaaaagattttgacaatataattaatacattgatgccatttggagctgcagcaactttatgggttccagctagatactctcaattcctaaatttagatggattagagtttagattaaaccatatgtagaggtaacaaaatagaaattaatgaggctaactaactcatattctgaaagaatatctttctacatagtcctatattttattagtagcaactataagatgactattaaaattgctattatgctcatgttatttatgaaaatggtaagaatattgattatctataaggaagcccagaaaggacaagcatgcgaaaaagcataaagatagatttaaatccaaatgaccctgtagataagctaatcaataagtatttagacagtcaaagaaatattagtcatactactaaattgcttttattaaaagcttactatcaatttggagaaaaagatttacaaaccaagattaacgaaaaggctatgcgaggagaagtcttcgagtttagtaattcgaagaaagaaactaaaaatgaagaccaggatttaaaaatgaacgagagtgatcagaaaaatgggcctgattttggcacattcttcgataataaagaaaactttgatgatctctaaggcgttcttactattgctttaggaacgctttttttttgaaattgttttttctcatttgaaaaaagagtacaataatttgtgatatataatatattatatatcacaaaaaaatatatgtagtgtagaccactctgcgataaaagaaggtgattttaatgtccacccttatgttctataacaacaagggcggcgtgtgactgagttgggaaaacaaccatttcagttatggcagctgattatttttctaaaagaaagaaaaaggtattactagttgacttagatcaacaatcttcagcaactctttttctgaaactaaatcataagtttgaaccagaaatgcctttctttcaatctatattaaatggtgatttaagtacaagtttatgtcatgtagccgaaaatcttgatattattcctggcgacgttgggatgacccggtttgatgaattcgcatttaaattatcctcgagggatcgttttaatgttttagaaaagctacttaaaccttttaaagataaatatgattatattatccttgatgtacctccttcgcgagggccaattgtatcaaatgctgttttagctactgattatgttgtgcttgtagtgcaagcacagcgtggaagttatgatatgtttttgaagtcaatcggttatttgagtgaattacaacaggagtatagctctaaacatatcttaattggaattgctctctatctggtatcaaaaggctctgttacagagaaaaagatatccaaagagattaaagataaatttaatggtatattagaccaccaaatttattatagtgagcgtgtaaaaacctggtcagataagggaataacgcactcaaataatattaatgataaacacacacataaaatgtacgatgacttttttgaggaaattgtaaagagaatcgaggcgtaatacgtatggcaaaagattacctattcgatgctgcgaaaagtgctgaacaaatgatggggaaggacttaaaaaaagaaaatccttataaaaagtctagagaaaagtcgagagcagcacaaattcgagtagataaattaaagatgatcaaatttattagttcaatgactggccgtaatattatagatattacagatgatttacttcaaattggacttaatgatcctagatataagaagtatcaaaagatcatgagtcaaattgatgatttaaagaataattaacaaaaacatataatagataataaattatatattatatataatttattatctattttttgtttaaatatgttatcatttagttagcaaaaagtatatttaagtattaataagatttaatattaaatcttattaatactataagttattatttgctatacaaatgttataaaaagtattaaaatgatagatgtagtttacaattaaattggaggaattcttatggttgaatcaatttcaaaatttgctaatgacttaggctatggtgctgttaagtataaaataagcaaaactgacaacaagactgatggagcgttgaaagagccagataaaatttcgtctgtaattgctatcgagcgtgaacaggatattccaaatcctattgaatttgatgataatgatcaaaaagatcagtatatgaataattttcttgatcatatggatgttactatatctagctcttcgattaaaacgcagggacgttttctagttggaaaagctgcaatagaaagtagattgcctctagaacaatttgatattaatgatttagcagggaaagctaaaaatgatttatcattaattctctctctaagcatcattgcggccaatagggtgaaagaagcttataaaaatggtgaagatttaaacgaaacattaaaagctacagtagttatggccacggcattgcctgtaacggaggttaaacgtaatggcactcgtgatgaatatcgggatcgatatctgaatgcgacgcatactgttacttttcataatttcgttaatccaattaacgtatcaattaaatttaaaaaagtatatgtggctgttgaaggtgaaactgcacaaatgtttatctcgtttactaaagataagcttttcttaagtagtttaaaaaaagaatatcaaaaaaaatatccagatctgtcaaagaaaaaaccatttgaggtaattttaagcagtaaaaatactattagtattgatattggagcaggtacaactgatgtgaacgttattgttaatggaagagcaaatgcgaatatatctatttcagtaccgtatggttatggaagtgtactggaagatgcggtagatgttttgcaagagaaaggatacccaattttaaatcgtactcagttagaagactttttaaaggacaatgatccgcttggagaagagcgtcgtaaacgtgttgaaaaggtagttcaagaacaatatgagacgcttagcgataggatcgttgctgcagttagccgttcactcagaaagtctggagcttctgctcaggcggtttctgtaagcggaggtggatcaattcctatggttaatagtcaattggatcgtaagcttacagaaaagattaatagttatagtggaggcaatgaggatatacctgtactttggatacctaaagaatatgcccaaaacatgaattgcaatggtttggagattgttgcagatcacctttttgaataaaataattaattaaggggagattatatgagtgatttaaaacaacgaatggtccgcttcccaaaaggatccgtttctgatcaatgggctcaaaatcaggataattttagtctatctgtaaggaagctggttgaagcaatcgtcccaatttatggagatggagactatattgatgttttaaataaaatgagtattgagcatttaaaatctgagctaaacacttcagataataatagaataagtacttccaaggatgaggtaactagagatgtcagaaacgaaccgaaacatttagtagatactcaagaaaaattagaagaaaatacttctaataacaaacatgatgacgataatagagacccatttcattttctttcctaaccttaaaggcaatgagcaaagtagcttattgccttttaatttttttgaaatttgagtatattgccacatcaattaaattcaccttaacctgttaatgaacagtaaaaatactgaaataattataaggaggatttgacatggaaattgatccaacgactcaaattgcaaagaatacagaagtagccacggataggacttatccaaactttatggaaacggctgaaagggtggcgtatgcagaccagaatgcggtagccgaatataaacgtgctattactgctgacttggatgttaataatttagtaaatgctatgggtgaagaaagtactattttcaaacttggagaacgtcttgttccaatgctgaaaatgcgtcttcagaatggagctcctatctacatctccattaacgaagcaggaagtaattatcgacatttagatgcgctagtaggtaagtctgttaagattgctgtaacaactttcgataagacaggtacttttgacgaaaatggacgtccagaatatattgctctagggtccattcgacaggcagaatttgttattggtggaattctatatagtgaataccagaaagcactagaaggcatcgaggaaaacaggactgatgtcaaagaagagaataacagtaacccaattcaaagttcgtttacagatgagataagagaaggggttgtttctgaggttattgatacaccacgtcttcaaatgatctttattgactatcgaggtatggcaataccaatgtatgcaaatcagtttgcctatatgacctatacacaaccgctaagtaatttagtaaacattggggacaatattcgattcaaaattagctctattacaaagattaattatgaagatatggatagtgtcaaagaagatatcgcaaatcatcgacagacacctaaaggtttacgctatcttattagaactacctccttaccattccgagaaaatcctgaggggcgcgttaaacggctacaaaagtcacaaagttcttttattgctcacgtagtccgctatgatccaattcgaggaattctagttgaaatagctcctggttggtggattaaaggagtactacctgcttcttcaaattacaagccatcgattaatgatgagattgcacacacacccgtaacagttagaattaataatcttgactatacaacgcgaagagggcgttgtagcattttagcttttccgcgaggtgtagcaaaatctgctaatcaacgcttttagaggtgatataaatggctgacgaaaataaaatcggcccagtaaagctttctgatagtcgattcgtagatccagagactggacagctaatcttgccttcacttatggataaggatcaagaagagcactttaagatttatcctacttggtttgttggggatagtacatttagtgactcattgcgaaaaattcgtaactacgataatgcggaccaatacagatcagtctatattaatttaagtcaagctgatttatattatttgaaattcatagcaagttttaaaagtgctcaaaaaattcatttaatacgggaagcattactatatcctgagttatttgatgcgactaaagttgataagtcactaaaacatttatttataaataatttagtgtggcgatggtcatatgatcatcctgtttatgggaaaccgattgatgtctatacattatctgccaatggatattattttctaaagactttatttggtagggaacattacttttatccaatgcttcttctctcgccaagaattccagatattttccacatacgtttctgggaaacaattgatctctatcaattacttgcttctataccggcatataggggatcaacaaccttattcggtggtagtgaagaaaagaaattaatgaaatcacctttacaggttgctttacatttaaaggacgaagtacagaatttagtattctatcctatgttattgactgatagcgatcagtattattcatcagtcattgaaaaatgggacgatttcactaataagggggaaaatctaaacactgaagttaatgaattaccagggaagcaaaatgttttaactttctatagtccaacacttaaatatgcagttgaatttgctaaaaaattcaagctcgggcagtatcatttcccaatactatttgtgataggttcagttattaaaaaatatgggattcaagaagctttctttgctccgcttattggtggaaaagataatgaattaaaacaaattaaatttaaggagttactagatgagacagcaaatgaaagttagaaaaatattattactttgtttagttttatcattggtagtaatcctatctggatgtggaaagcaaaaggtaacgacagcaaatcagcataataaacaggaacaatcggattcaagttcttctagacccactttaagtcttgaatttgttcatggagaatatcagcaagcagccggccttatctcagttccaattgtttttgaaaatactggtagtaatcaaaccttaattgattctaataactttactttaattgttaatggtaagaagtatcatccttatcaagaagacaacgaggcttcagatttccatattgatttttttaataataatgtttatcagaacacagtaacatttaacataaaaaagcgattaacaaagtctgagctaaagaaagtaaagctaacctatctaactgataagggaaacgaagtgaccgcaaagaaaatcagtaaaaatgtattacttcaagatattagagaaaatgtatcaggatataatccaacagatgttggaacttattacaaacaaagcataagctatttagaaaatgctgctgaacaaaagaaaaaggatccaaatgctaaaataacttcaattgaagatcgttttaatgataaaaaatatgatcaatttcatatttgggtggcggtaccatccactggtaatgtaggcagtaacgttgttgtattcaaagtacttaatgattccaatacagattttaatgtttcctatggtgatcttgaacttgtcgataaaaatggtaacgagattcaggtggcaccatcatatcgaaactttaatattcaatttccgcatggtaaatatactacatttgtagttcctatggaggctacgttaaaatttagaaaacaaccatatcaagttgaggtaagagctgattcatcaggaaataatccaaccgggtcttttttcaatactaaaaaaagctttaatccagctgaagttaaattttcaaatgaaataactagtgatactctattctctctatctcctgtgcaatatccaaaagataaaatagtgtggtcagatcaaaaggttgatacggctagtaatacaattactgctgaggtccaattgatggattattttaatctaaagaatgacaattatcagttaattggatttaatgatgatggtcaacgagagattgaaggagttaaagcaaaaccagcttatgttgcaactacggataaaacaaagattacttggaaagctaagaacatgaattccgtaatggcctatcaacatgttcaactacaaagctatggtaaaacagtacttaacctaaaatagaatagtagacttgaaagaagccaagttcatgttaagaactcagcttcttttttgctaatattcgttgaaaatgtattcaaaatgacttatcatatgaatgacagatgaaatccaatttaactgttaaggtctacatatttaataacatattaaatatctattcgtattaagggggatactaaaaatgcgtacgcttagtcgccgtatggagatgttaatgaatgccaaaatactagacgggggtactatcacatatgaagaacatcgtagtcattgtgatggctgtgtatattgtgaacatttacgtctactagaagaggcaattaaacaagacgaaaatttagacaaagtatatcaagagactggtgtttcaaaggagcgtcagatttatttgcgtgaatcacttgagccacagcgaattgaagactttaactttgaaccaggagatatctatactaagactggaaacattaatcgtgagacttacttagtattgaagtttgttgaatttaaggatacagaaattcgagattattttggaattaataccaacaaatgggcgaaatttaagaagcaagaatttccaaaatggaaaacaaaagataataaggatagtgttcttgctaacgaggcatttagcgcttataagcgttggtgcaacagtccaaagaatcgacaaattcgtttatcaaataaataaaagattgaaacggctatagcggtaacgcatagtcgttttttaatttcttaagtgatctgcagctctatctaaaaactactcataatagtcttataaatagaataaggagtgactatccatgaacctaaaactaagtccgttgcttttatcaggggattttcagcacggtttaaataacattcccgatactgggggactagggggtagtggaggagccgactacacaggctctttctatggctttgtgatctcaaaagaaacgttcgcagaaattgggcgatgggttaatttattaaatatcctattagtgattatgattatctggggtgttattcatgttgttattagcatcattggtaatagtggtaaatggcggaaagcaggtagttcgattgcattaaccggatatgggttgctactattcgtacacatggcaataatcgcgggttgcgcatctgggcaattggctgatggtaaactgattatctttattctaattgcattaagtcaattggttttttatattggagcaccaatgctatttatgttaggaagtgagtggcaaatgatggcagaaatgacagaacgaccacaatatatcaggcaggcgacacgtgcctatggatccattacagctttgatggcgtttggcgcagttgtttacttaataggggagttgatgtagatgcatagaaaaaaagatgattatttagaaatagtatttagacagggagtaaaactaattattagcggagtaattattggcctattgatggggctcttttctctaattgctagtagcaaaaaaatggcttattgtccttttgaatctacagctgaagcatctgtcttaccaaatttttggcataaaaaagatcaaccgaaaccattgcacattactacaaaaccacaagcagttgaagtcaccactgttaatgcagataattctttaacggttcgtggggaaaatatgtaccctaaaagagtcaaattgttattactgtcttatccaccgaaagggtgctatggccaggatacagcgcataaagaattaataaggttaacgaaaggtaaaattatgtggatctttactgataagcaagctcaaaatagcaactatgtttacttgcagaaagattcaaaaataattcaagaaagaatattagagcaaggagatgcagtgatgtataactataatggctctgaaaaatatttctataacatgcagaatgcgcagcaaaaagctaaagagcaactaaaaggtgtttggctagtcccagggtacgttacagataacggctacaataagaaagtaggtcgtgtaaatggaaattgataacaaacataagtactcgctagatgacaagtacaaaaagccttatgacggacttctgcatcgaattcaaactgtttcccttttaacaatggctggttgtgctttaactatatttattgttcaaagattatgtcctattatttttgtgaaaatagaagctacaatacttttagtcgtaactgttattagtttttcgataggctttatctggcttaggagagatttcttggtttttaaggacctctatctacacaacttagatctgcaagaacaagtagcagaagagcaaaagaaacaaaaactactaaaaaaaggattgaaacatgcaaggaaaaatcattagaacgatttggattactgcctgcatgcttttgtttggaatagcggcaggctttctatttattaatacacagattggccgatcttacatagttcgtaataatgccactcgtatttctaagactttgacagcggctgaggcgcaaaagaatcaaaaagcttcaacttcatatgacgcaagtaaaactcgctctgtaagtgcagagcagcttctcagagcatcaaaatatgaggctttcccgatcggtagaatgtcaattccagtcgttaacacccataatccagtctttaacggctttgggactcaaaatcaaaatcttagtttcggggtatgcactgtaatccctgatagaaagttaggaggggataataactatgtattagctggtcactatatgggaaattacgggccggctgttcttgacaacattcatctattgcataatggagaccatatttacgttaccaatttacagaaaatatatgtttataaagttactaagttgtatttagcactgaaaccaacacaggtgagtgtagaaaataacataggaaagcagagtctgattactttgattacttgttctgattttaatcaaactaaatatggacttggtaaacatagaacggttgtacaaggcagattacaaagaacctatcctgcaacagagaataatttaattcgatatgaattaagtagtgaaattgtaaaaaagactgttcatcggcgttcaggaactacgaaactaaataatatcaatttctcagaaatatgcgctgcttttgcgattgtctgggtattgatatgggcgtggctattgattcgagtttggaaaagataaaaaacaataataaattttagttccacttatgaggtgatgtgaatgcctttatcatatttataaggccttaatttaatagaacactatattgtacgaaataagaatattggttaatttgcaaacaaaaaagcctgtcataaagacagacactgttatattctgctgaaatgattggcttaatcaaacaggcactaatacaaggataaagatgctggtatgcaaattggattatttggctacttatccgagccggcgaaaagatgccctttttatacctaaagtcaaccgccatcgactaaagtcacggtatttctggctgaatatcataaaaaattcaaaattagatttttatcgtcttggaataaggtaactcgattcggcagccttagcatatactaaaaacgttaaatactttacttacataataaagtatttgactaggcatattttacggtgaacttatagaattcttgacctatttattaacatttttgaaagcgagttctacgcattactccccctgagtaatagaataattaaatataatcgccctaaagaaagtcaaggataaagagacccattatgatgcacctcctagagttagcaataaactctaggggggatttttgaaattaggcaagaaaacaagttctttttaagtgttttcagaatactattagtgctaatcattcgtttctttgcaaaaaaagtgattgtgatgatgaactacacaccgactaaagtcggtggtttctgggaacgcaaagtagtatttaggctgttacattggtattccaaatacctaacttacagaacttcgttcttttaccacggctagtccctagccaacggcttttaaccctttatgcagaatattaactgccgcattaatatcccgatcgtgatgggccccacactttggacacgtccattcacgaattgcgagcggtttagccccactatggtagtcacaatgactacagatttgactggtatagtggggcttgacaataatgagctgtttaccataccagtcacacttgtatgcgagcatggtacggaattgatgccaactagcgttagcaatggccacggcaagatgatgattcttttgtagattcttgactttcaaatcttcaatcacaatcacatcgtattgcgtgaccaatgccatcgtcaacttatgcaggtaatcaagtcgctgatcagtaactcgtcgttgatagtgagctttctgaattcgggcccgttgccagttctggtagtcattcagttcctctttgacgtcctgatggttatggttccattgacggacactcaccgtggcttgatgacggcggcgactatacttggactgccaatgttgcgcctgttgagttaaccaggtagcgtcaaatttagcatacttatggccgtcactagtaatggctaaattagttacgccgacgtcaatgccgacctgttgactagtcttcggtagtggctgcactgtggtctcaacctgtagtgacaggtaataacgatccgacggatcataactaacagtatagcgtttaatcttacaatgagttaactggcgagttttgctggttttaatatagccaattttgggtaatttcaaatagcggttcgccactatttgaattttgcttttaccagtataggaccgcttagcagacatgccatattgatcaataaactggctactaggattgttttgataacgttgttttgccatatcaagcatctggttccaaacaaagcggtcattgccaaacatttgccatagttgagcttgttgttgcttgttggggtacaagcgaagcttaatccctttcaaaattgtggtcatgttttcacctcctttatgctttaattttactaaatttgcaggggtgaaaacgagattttatagactttttagtaagaaaaagcagtctcatggctgctgtagaaggtattcatcccatgactaaagtcacaggctttctacctataattttcagtaaataatggaatgccctacagttgttagacaaagaatctaataattgtagggcactttttctatggcaaaatatcaagttgtgcaggaatctctaactagacgcggttttccataaaattgagtacctcccccgtaattagctaaatggcagcaaaatgaaaaacgtaaagtttagtaatttaactgctactaattagcacaggaggaatcttatatggcgcaaaagcttatgtcggctaactctactgacaaaaattttaaaatgtataagagtaagaaaagttgggtattcgcatactctacaacattagcattagctgcagttgccggcattacactgtctacaactaatgttcatgctgatacaactaatgggggagacaaccaggtaaatgctacggcagttactcaaaacacaacgagtaatacggttgatcagattgctgctaatactgcgcaaacagataacactagcacaagtattaatattagaagcttaatggatgacttggcatcaggcgatgacacgtcctctagtcaaaacggacaagaacagtcacaaaattatgcttccagtaatcaaaactcccaaacccagcaggaaaacggaactacaggacaaagtactgcttctcaaaatggaactacctctgatcaaactaattctgatcagagtgataagaactactatgtaatttcaacccgggatttagataaaaacgggaatgttaattatttaactcaaaagaattacaccagcatcaagggacaagaagttgctgatgggacagttgtgacgtggccgctaagtgtttcggcactaccggcaaatcgtgctcaagatttgaagagccacgttatttctgaaaccctggatcctcatttggaatatcttcattatcgcgcttacttaactaatactgatggaacagtaacggatgttactaatcacgttaacttgaatcgcagtggacagacattaatatttactgatgataattatctactttcaatctataacaataatcgctatcgggtacagaacttaccagtaatcaagctagtcacaaaggcaaatggtaatggttatatcatccccaacgcttttaaatcatcatatgtctttaatgatggtagccatgatgtttcatttacaaccacgtcaaataatgttcaaattaagaccttcaacccaggtaatagtaaggatgttgaaattggtggcaatgttcaaggtgatccttccggaacaattaatggacaagtagttgcagacggttcagtggttacttggccaatgtctgttggtgatttaccggctaaccgagcacaagatgttttaagccatattgaaactgatacgttatataacggtctaaattatgaaggataccatgcttacttgccacaagctgatggatcattccaagacgtaagtagccacattaatgttcagcaaaacggtcaggatttaacttttattgccgacgactacttaatcggattatacaatcaagacaagagtactgcatttaagatgccaatcattgacttgattacttcagttcatggaacttcaattattgctcctaataagttcaattcacaacttgcttttaaagatggtaatggccaaaccgttattaataacacttctaatcaagtccagatttcaacatatcatcctacgaataccaaagatgttgaactcggtggcaatgtccaaggtgacacaccaaactcaattaacgataaggtagttgctaatggtgctattgtaacctggccaatggcgtcgtccgaacttccagcaaatcgagttcaagatctgcagagtcgagttatttcagaaactctagattcacatctgcaatatcaagggtataaggcctggttacaaaatgcagatggtaaatatacggatgtgacttcgcacgttaagttgactcaagatggtcaaaacttaacgtttgccgatgatgagtacttactaaacttatataactcaaataagggtactgcttacaagttaccgattattgatctagtaactaaagttaatggagcaggtattactgcgcctaattcttacacaactaagtatgtttatagtgatggggatgggaacacaactatcaatgtaacctcaaatactgttaagatcagtacattcaatccaacaactaataaagatgttgaacttggtgataacattcatggtgatactgagagttccattgctggtaaacttgtttctgaaggtaccattgtaacttggcccttatctacttctgacttgccggcaaaccgtgctcaagatgttgtaagccacactgcggttgatgctcttgaaccaacccttcaatacattagttatacagcctggttgccagactctaatggtcaattacaggatgtaaccagtcatgtaaagatgactcgtgatggtcagaaattaacattcaccgatgatgattacttaattggattgtataaccaaaacaaggatatagccctaaagatgccaatcattgacctggtaactaaggctactggtaatactaagttattaccaaattctttcgattcacagtttgtctacaatgatgtagatggtaatacaattattaatgtttcttcaaacaagccaactgttgaaacctttgatcctacggttcataaggatgtagaactcggtggaaacaacgtgcaaggggacactcctaactcaattgatggtaaaatcgttgctcaaggaacagttgtaacttggccaatgagtactagtgatctgccggctaatcgaactcaggatgttgtatcacactctacaagtgagactctaaaccaaaatctacagtacgttggctatcatgcttatatgccagatgcaaatggaaaattacaagatgtaactagtcatgttcagctacaacaaaatggtcaaaatcttgtcttcactgatgactcttacctaatcaatttgtacaaccaagacaagagtattgcatttaagatgccaattattgacctaatgacaaaggctatttctgatagtgcaacgattcccaacacctttgaatcacaatatgtctttaatgatggaaatggcaatactacttttaaatctacttcaaatactgtccaaattattacctataaaccaaagacgacaaaggacgttgaattaggtgataacattcatggtgatacaaacgcttcaattgcaggtcaaatgattactgatggaacagttgtaacttggccaatgagtactagtgatctgccggctaaccgaactcaagatttgcaacaacacgtagttaccgacaacttaaatgacaacttgatattccaaggctacacagcctggttaccaactgcaaatggtttagtcgatgttactaatcatattgaattaacacgtgatggtcagaacctaacatttactgacgatgcttatttgctcaatctatacaatcaaaataaggatactgcgtacaaattaccaattattgacttggttactaaggctaacggtaatactaagttaatccctaataattttgactcaatgtttgtctacaatgacggtgaccaacagactacagttaatgtaacctccaatacggttaacatcagcacatatgatccaactgcaacaaaggacgttgaacttggggatgatattgaaggcgatactgcggacactataaacaacttaatggttcaaattggaaccaagatgacatatccattgactgttagtgatttaccggcaaaccgtgccgatgaaattactgctcatcaaagtgttgatacattgagcgactacctcgagtatcaaggctacaaagcttacttaccagatgctgatggtaaactccaggacataactgagcatgttaacctaaaacgtgaaggtcaaaagttgtcatttaatgatgatgattatctcatcaatctgtacaacaattccaaggctactaagcaggctttgccggttatagatctggtagccaaagttaccggtagcaatgatggtaaaaaagtccacatcattcccaaccattttgattcaacaattactactaaggatgggaagattaacactacttctaatactgttgtgattaactcgaatgatccagaagctgttaaagacgttgaattgggtgataacgttgtcggtgatactcctaattctgtaacgggtaccacggttgctgacgggaccatcgtaacttggccaatgtctgttggcagcttgggagcaaaccgggcacagaatgtaattaagcacaccgaaaccgaaaatcttgatagtggcctaacatacttgagctttaaggcctacttaccagacgctgatggtaaaatgcaagatattactgaacatattaatattcaacaagacggtcaaaagttagtattcaccgatgatgactacttaattagtttgtacaacaaagataagtcacaacgttttgctttacctgttatcgacttagtaacacgagtaaacggtgataacaagataattccaaacacatttgtttctcaatttacgtttaacgatggtaagggcaatacgattacatcggtaacttcgaatcaagtcaatgtctcaacatttaaatcaaatcctgaaaagcatgttaccttaggaactgatattgaaggtgatgatgctgaaaatgctgatggcacagttgttgcacaaggttcagaagtaacctggccattatctgataagagtccattgccggctaaccggtcgcaagacgttaagagtcatacgctagtggacaagcttgacgataatctgcaatacaatagctataaggcatacttgaagggtactgatggtaaactgcaggatgttactgatcatattaaactgactcgtgatggtcaaaatctcactttcattgatgatgattatctacttgatctttacaataaagataagtcaacagctttcaacttaccgattattgatttagtaacgacagtagtaggtaatgataagctaattcctaacaagtttgactcaaactttgtcttttctgatggaaacaaagacacaagtatgaagacaacttcgaacgaagttagtatttcaacgtacacaccggttactaataaggatgctgaactaggtgataatgttgttggagacacttcggattcaatcgcaaatgaaacagttcctgatggaacaattgtcacttggccacttagtgtttcatcattaccagcaaatcgttctcaagatgtgttcaagcatgttattgaggacattcttgatggtaacctgacttataacagctttaaggcttatttgaaagatgctgctggtaatttacaagaagttacggatcatgttaagttggctcaagaaggacagcacttaacctttacagatgatgattacttgattaacttatacaatagttcaaagaacaaggaacaatcactaccgattattgatctagtaacgacagttcatggtgactcaaagctaattcctaatgaattcgataatgtatttgttttcaaagatggaaaaggtcaaacaactgttaaaactacttccaataaagtgactattaagacagcaagtctgcctacaccaactaaggaagaaacagatgatcagggtaacaatattaacggtaatgaagttaaggctggagaacatgttaactacacattgaactgggatctttcaaacgataaggatgttaaagcaacaccagaaatgatcaagaaaggcttcttcttcattgatccaattgattctcgtgctttgagtgtagatgatttgagtaaggctaaagttgttgatcaaaacggcaacaaagtagatggaattagtttccacttatataacagtctttcagaagtacctgaatttatccaagaacaagtcaaggctaataatcttcaagacaagatcactggtccgtttgtggttgctcaagcagatgatctacaagcattcttcgataaatatgttaagactggtgcaaagttgaaagtaacaattccaacaattgtaaaatccggcttcactggagagtttagcaatactgcttatcaattcggctttggtaaggcaacaccaaccaatacggtaacaaactatgtaaagccaatgcataagcctgcatcccctgaaactccggctgcaattgcgccacaggttattagtgctacagcacaaccaatgacatcggatgcaccagtaacgcctagtgaaaaaacggctaaattgccacaaactggtaatgctgacgaaggtgcgttgttaggtttggctgcggtaagtctagtaggtagtctaggattagctgccttaggacttaaacaaaatagaaatgatgattgagcaagaatttatcccatagtttgcgagaaatccttttagaagagcttgcctaataatagcggctcaatataatttaaatttaaaaccacctaattagcaatcgtaaaattgttaattaggtggttttagtatagaaataacccctaaattcagaatactagaaaatctagtactattattttttccttttcgggaataatagacatgaaagacaagaaaagataagaaatggtaaggaaactttgtacagtttaataaaagcagttgagtattgactattggcgtaagttttgatttttttaattgtaatattaatagaattatttaatctatgaaatactaatttcacatttgcttttgtatgtgaataaatctctttttcttggatcttagagggttcgtaaggtaaggaattaatttgtttagtatattctttatccgtagtttctttaattaatttcttcgaaaaatgctttgatggtgttcgagagtttgaattgttgtttaagcttttaatagagttatctcttattttatttttttgatatttaggaatatttaagttattgacctgctgattgatgtaactaatagaattatgctttgcggtatttaaattcccatatagtccagttagaaatattgctacagctaaggaaacccctacttgtcttaaaacacctgcaacactttgtgaagcggttaagagataaccttcaaagtttgatgctgctaaaactgttattggacctgcaataatcccatacccagttcctaaaataatacaagtaaaaataattaaggtaatattatccatatcaatatgtgtaaataaatagtaagagatacccattaatagaaaaccagataagataatggctcgagatcctaatttgtctaagagaattgcagaaagtggtgacatgataaaaatcattcctgtaataggcgtgataagaagtgcagcttctaattcggttctatgttgtatatgggtaaaatatgttggtaaaattactgtaacagccaccagaaataaattacttaaaattatagaaacggcagagccggtaaattctctattcttaaataaaacaagaggaatcattggtgctttagcataatgctcagtaattaagaatagtatgaaagttaaaatgaaaatgaaaaacagaaggttgattgcaggacttttccacccccagcttcttccttgagtcaatattagagttaaagctgaaagtaaaattatacctaaaagggaacctaaataatcatttccttcatttgactttggttcgtgaaagttgaaagtagataaacaaataactagtgaaagtatagtaaaaggtatattaacgctaaatatagaatgccagcccataaattgagttagaatacctccgattgaaggaccaagagcagcagctaaaccttgagtgattcctaatgcggcaataactttttttcttgtctttactgtaacgatatttattccaatagtcattgaaagtggaaaaagaattgcggctcctaatgattgaatgccacggccaagaattaaaatagctaggttaggacttataccagaaatacttgatccaataagaaacataattaacccaattatatataagaaattcatacctaatttttctgcaagtttagatagtgggatcgttaaactagcaaaaagtatagtatatatgtttaatgcccaagacaaattagttagagtgacgtgaagttcgttttgaatagctggcaatgcaatattcataacagttgtatctaacatacataagaaaatactaatacacattgcaattattattagaaatttgttttttcttttggtcatacttgtttcctcactttgtttatattaacaatgttaatataaacaaaagaaaaataaatgtcaacaatattatcattgtaaatatgaacaatatgtattaatataaataaaaattagtgaggtgattttatgacagctgtaatagttggaattggtattactagttcctgtggagagtcctttacagaaattgaacaaaatgtaggtaaaggaaaaacaggtatttctaatatcgattattttgatacatctgagttaacatgtggaattgctggtaacttatcaaagaaaatatggaaagaggttttgcaaattgctgataaaaatgaattagattggagtagtagtctttcaatttatactattcagcgattacttgaatcgtataatatttcaaaaaaacaaagaattggtttatctcttggaacatgtaatgggggaattcattctttagcagaatatcttgatacttcaaatgataaatttttaaaaaattatcctccgtacattcagagtaaagatatcgcacattatttcaactttaacgggccaaagtattcttttaattcagcttgtgcggctagtgctaatgcaatagcttatggagcagaaatgattaataatagcgatgcagatcttgttgtgacgggtggttgcgatccaatgtcagaatgggtttttgctgggtttaattcattaagaacctttaatagtaaaaattgtatgccatacggtgaggaatatggacttaacctaggagaagctgctacatacttcttattagaagataaagataaggcaattaaaaaagggcataggatatatgcggaaattttagggcacggcttatcaaatgatgcttatcatcctacagcgcctgataaggatggttcagggatatcctatgcaataaaaatggctttaaaaaactcgggtctgaagcctgaagatattttatatattaactctcacggaacaggaactaaagccaatgatagtgcagaatacagaggatttaaaactgtttttagaaatgagatgccttttattagctcaatgaaaggatacgtaggccataatctgggagcagctgctagtacagaattagctataagtttaatcggtatgaatagtcagaaagttttgtatcctaactttaatttaaccaagtatagagaagattgtaacgatgagcatatcttaaaaaagccttattcattagatggatatgaagatatcaactttataaacaataatgctgcgtttggtggacaaaatgttgctgtaattttccatgttaatttagaaggaaaatatggtcatagtgaaaagaaacttaaaacacagcaacctatatatattaataattttggcgttgcaagtgataaagcttatatgacaaagcatggtattggtattcttgacgatttacgccccttaaagaaaaaatatccaaaattatataagcgacggatgaatatgttaactcaagtaagtattatcgcggctaaacaaacattgcaggatcagtatagtaattgtgggcttgtgtatggtacgccttttggtagtctttcatcaacactaaaatatgttgattctattcaaaaatatgggtttaaaaatgctagtggggcatattttccagatttagttattaattcaacgacggggcatatttgtcaagcgctttcattgaagagttatagttcatctataagttcaggaggtgatgaagacttaagagccttaattattgcacataatgcgcttaataaagggtacgcttcaactatgttagttggagcaggccaagaagagacagaactgggcaataaagtgttgaagcgtgaagttaataatcatgcaacatttttaagccttagtaacaaaaaaatgcaagaaacaatagcagaggttctatcttccggtgcaatgggatttaaaaataaaaaagagcttttgaccattatacgatcgaaaatagatgagaagttggctaatgatgcagatctaaaagtgataattcaaaataatagtgaaattacgaacgacgaattaataagttatttcaagaatgataacaatatcagtataaattctgataattttgcggatagtaattttaaatcatttgttaatcatagaaatgaaaataggttgttgcttgttggaatttcacaagtcaatgatgtttcgtttgcagatattaaaaaaataaaatagagaaagaggtaatactgatgaagcatagtattgaagaaattaaggatattttaaaagaaaaagtattaattgaacgattagagttagatgatgtagaacccaatgatatttcagataatgaaaatttatttgatgaagaaggactagcgttagattccgtggaagcattagatatcatgacaggaattagtgaagaatttggcattgacacatcaatgttagggcaggaagatataaaccattttcaaagcgttaatgatatggctaaatatatctcagagaatgaatagaggatagttatgaaatcagtacttatcacgggaataactggaggaataggaagaaaattaactgaagcttattcttcaaagggatatcatatttatggtacgtgtagtagaaattcagactctttacaacaatttaaagagaaatggcctagtgttgaaataattcaaataaatcatgatgacttgatagatgtaagtacagaatattcctttttttttagaaaagtgcaaccagatattgttattaacaatgctggaatagtgaaagataattttttagttcaaatgtcagtgaatgattttcaagaagtgttgactactaatttgatttcggcttgggtaatagtcaaagaaatgcttttacatttaaatgataataaaattcataaaatcattaatgtagcttcaatatctggaattatagggcgtgaaggacagtgtaactatgcagcaactaagggaggattagtaggcttatgtcaattgatagaacatttagctccgaaaggcagtaatgttatttcattttcagttgcaccaggattaattgatacagatataaagggaaaaatgccaaagaaaaaaatcgataatttaaagaaggccacattggcaaataggctaggaacaccagaggaagtatcaaaatttatttttaaactatctgaagaggatatttcgtatagtgatggaactttatataggattgatggtggagttttaaaatgaagataataaataatacgattcaagtaaccgacttgcttcaatcatatggaaaagatgaaaaagacatagtaataattggtcccagcccatttaatgaattagattgccttaaagaaacaaaaataatcgataaagttcagcttaatttagaggaagttttttcatttgtaaaaaataatagcgttgctttaatgaaaaaaagaagaggaaccattgcctttttattaaatccacaaagttttgagggaggcaataatatctattctccaatctataattcagcaattaagagctttttgaaatccttatcgaaggaaatgaatccattcagagttaaagttatggggataatcttacctttaacacaagatacaaaatcgactcggaaatatgatttagttacattaaagtacaaaggaattaataatgaaaagcaggtacaagatattctaagcttacttaagctttcagaaatactaaacggacaaattgtctcgctaggcgctgaattgaatctttagtaaaggagagggaaatcattttatttctagatcaaaatgcagttataaaaatgttgccgcagaaggagccattcaggttcttagatacggttgaatgctttgatagagaaaaacgtatgattactgcattgcaacaatttggtaatgaggaattcttctttaagggtcattttccaaataatccaatagttccaggggtacttctaacagaatcgattgctcaagcaggtttgatattgatttctttattagaaggccaaaaagtgaaaattggatatctagcccaaattgaaaagacaaaatttttcaaagaggtctatcccgacgagcaagtaaaggttaaatgttcattaaagaaaaaaataggtaaatactattacattgcaggagaagtctactcgcagcaattaaataaaagatgtatgagagcaacagtaatagtatgtatttgatatggtgatggttcatgataaaaattactgaaaatatagttcaaataaaactaaagcaaggcaaaaattatccagacgttaatgtttatgtacttctaaaagaaaaagtgttaattgatataggccccaaatcaattaatacacttaaccttttaaaaaaagaattagctaggttaggattaagttttgaaacacttaatttaattattctaactcaccatcatgttgaccatgtaggacttttagagtaccttccctctgggttacgtatcgttggacctgatcatttagacttttatagttcagatatttataaaaaaagtattcaaaaattgttagttgacgataatctctctattgaatttaaaaatgatatagaaaaacaacttactactgaaataattccaagtattaatagagaaaactacgttccttttagtgagtcaaagaaaattttgcaacaatttggtcttacagctgtagagctatcaggtcattctagtgaagatattgtaattactgattcagaaaataactgttttactggtgatattattattcctaaaattttttttaactgtatatatgaggttgataaagtaaggcccaaacatcaacgttggtcatattatcatgagcttaattttttagacaggttagtaaacctagtattgccaggacatggagatattctaaagttagaagaattaaaaaaggcagttttggttaatagaaaaagaatgagacggacagagaaaaaaataataagagagttaaataaagaaacagttaatggagtggagaatgtttgtcgaagtgtattccaaagttttttgccttatagcaaattcttaccgttttcagaagtagttagtgttatcgagagtaatgatgagagaattaactattgatattatttatataaatacactaaataataacagctttgcaagtttagattctagaaaaagaatcaaaaagttacagcatcagctaggacaatatatgctttctcaaatatcttataaaaaaggttattcaatttcccatagtcatatgtgtgtagccttagcaagttatgttaatagggttggtattgatattgaacttataaataaaacaaagaaggcaaggatacagttcctttcgaaaagcgaaaaacaattagtaaatagatatggttttacaagaatatggacactaaaggaagctatagctaagtatcataccgttgggttacctcggcttaatacagttgagattaaagaaataaatgcttcgaacgttatctattttgttaataaagcaccaagaaaattgcagtataaatttttagatataatcccttcttataggttgagtgtagtggcaaaaaaggtatcaagtttttgcattagaatcacacaagaagaagatttgaaggggctaataaggagaatgtaattaatgcaaggaagagacataattctaggaatacttgaacgaaataatagaacaggatatgaaattaatgatattttgaaaaatcaattatcttatttctatgacggaacatatggaatgatatatccaacattacgaaagcttgaaaaggaaggaaaaataaaaaaggaaaaaattgtgcaaaatgataagccaaataagaatgtttattctattacagatacgggaatagaagaatttaaagaatacttggattcttctattcaagatgatatttataaatcggactttttaatgcgtctcttttttggaaactcattaccaaatcaagaaattattagagctattaaacaagagatacaacgtaaaaatgaaaagatagatcaattaactgtaaattataaaaaatggaaaaaaaatggaatgagtaaaacacaagaaataaccgtcaaatatggtattgcgcagtataccgcaattgttcagatgctgacaaaagagcttgatacgttacgaagaaatgagatggatgattaatgtcattaggaattatatttagtgggcaaggagcacaaaaatctaaaatgggtcttgatttttatgaagatccactatttgctgaattacttaaccacgcaagtaatatatctggtctaaacatgttaaaaatcttggaaaacaaaaataatgagcttacagagactgttaatttacaaccaacattaacaacattgaattatggcatatatcgaatgctgaaaagggatatttttgatatgaaagtaagctgtatggcagggctttctttaggagaatattctgcactgattgcttctaatgctttaacttttgaacagggaatacaattactagtagaccgcggaaaatatatgcaggaagcttcgaatagtaatgcaggaaaaatgttagcacttataaaacctaaactaaaagagataactcaaatttgtgctttgtgtaaggttgaaattgctaattataattctccaaagcagatagtaataggcggacaaaatttgcaaattgaatttgcaaagaaaatgattatggagcgtaaagctgcattaagaataattgagttagaagtaagtggcgcctttcatacttcgttattttcaaatgttcaaaaacaattggaaaagcgattaaaagatgttaaatttgagaatccacaaattccggtagttagtaatactacagttgaggaatttcaaaaggaaagtcttacagccgtattatcaaaacaagttgctaatcctacatattttgaaaaagatattaagttaatgaaaaatacttatggattgacacatatagttcaaattggtcctggtaaggcattaagtaattttgtgaagcaaatgtcattaggaattaagacatataatatttctaatataaaagactatagaaaatttctgaatagttatagagatattaatttgaaaggaaagaaaaatggattttgagaaaattcagcaactaattcaaatgtttgaaagctctaatacaagagaactaaaaatagatgataataactttcacatttatcttacaaaaaacgtaagtaaagaaccaattcacgatataaaatttgaatcgaataaaattcagcaagcctcagaggcaaaagcaaacaggaaaacgataacagccccattggttggaacagtttatttagcctcttctcctacgtctaaaccgtatgttcaagtagggagccatattgataaaggagatacagtgtgtgtaatagaggctatgaagctaatgacggaaataaaaagtgaggttaccggaacaattgaaaaagttaatgtagagaatggagaattagttgaagttgggcaaccgttattttcagtttctggagaaaaagaaagttaatgaaagagtgaggtgtagtgatgttttctaaagtactagttgctaatcgtggagaaatagctgttcgtattattagaactcttcatgaattgggcattaaagcggtagctatttattcgattgttgatcaagaaagtcttcatgttcaattggctgatgaagcagtttgtgtaggtggagcacgaccacaggattcgtatttaaatactactaatattttaacagcagcaattggaacaggagcacaagcgatacaccctggctttggattcctttcagaaaacgctgagtttgcaagaatgtgtgaaaaatgcggaatagtatttataggtccgcgtgctgctacgattgatttaatgggaaataaagaaaatgcgcgcgagactatgcaaaagagagggatacctgttattcctggaagtagttcctacataacaaacagttatgatgcaaaaagagttgcagataaaataggatatcctattttaataaaggcggcagctgggggtggaggtaaaggtattagaagagttgtaacgcctgagcaaatgaaacaagaatttaataatgcgcaaagagaagctcgtatatcatttggtgatgatcgtatgtaccttgaaaaaataatgtgcaatgttaaacatattgaagtacaggtagttcgtgatagattcggaaatagtgtctattttccagaacgcgattgttcactccaacgggataagcaaaaaattatagaagagagtccatgctcggttatcaattcagaacaaagaaaaattttaggaaggtatgctattaaagcaattgaagcagttgattatcttaatacaggaactattgaatttttgatggataaaaataataaattttattttatggaaatgaatactcgtattcaagttgaacatactgtaactgagatggtaacgggaatagatctagtaaaggtacaactgatgatcgcttcaggtgaggaacttcctttttcacaaaataatattaagttaaatggggtagctattgagtgtagaattaatgcagaagatcctaaaaataactttgttccttcaactggaaaaataaattatttatatttacctgtaggtaacttgggtatgagaattgatactgcactttactctggagaaaagataacaccattttatgattcaatgattgcaaaagtaatctcgcatggccatactcgcgtagaagcgatcaatagaatgaagaggttaatgcaagaactggttataaaaggtgttaaaacaaataaagatcttcacttatcaattttgggagattcaagttttttgaaagatacagtaacaactgagtatttagagaaaaactttttaccaatctggaaagagagggagaaaaatgcagctgtatgaaagtgcaacgttaactaagcaacatgtaaaggcgaatattaaagcaaatcaaaaagtacctgatgggatgttaaaaaaatgtcctaagtgtgggaaaatctttctgtctacagaatttgataagtatttttcgtgtcctggttgtaattatggatttaggattggttcatggcaaagggtagcctgggcggttgatgaattttatgaagaggatggttcacgagaactaataacctcagatcctttacattttcctaattatgtaaaaaagattcaaggacttcaaaagactactaaggtaaatgaagcagttttaacgggtaaagctaaaataaaagaccaaatttttgagtgtggcattatggatcctcactttataatgggatcattaggaacaattactggcgaaaagattacgagattatttgaacgtgctacaaaggagaggttgcctgttgtcctatggactgcttcagggggagctagaatgcaagaaggaattatgtcattaatgcagatggcaaaaataagtcaagctatagcacaacatgcatcgaaaggacttttatacattgttattttaactgatccaacaacaggtggagtaacagcaagttttgcaatgcaaggagacattattttagcagagccacatactttagtaggatttgcagggcggcgagttattgagcaaactattcatgagagaatcccagatacgttacaggatgcggagaatgtaataaaacatggattcatagatttaatagtatctcggagtgaagaaaaatctttactttataaattgttaaaatatggtaggtgataata

SEQ ID NO: 53 - DNA, 150023 bp, synthetic construct
  misc_feature 1..150023: note = Based on Lactobacillus reuteri
  source 1..150023: mol_type = other DNA
ttgttgagaagcatgacttaaaccctgatccagctactttcaatttccgcaaaatcttcgggacagctgaccggtcagatgcgatttactctgaaccgcgggtatgggttggtcatcaaatgtttagtccccggcaagcaacggaagagaccccagaatcaaccgaactgccatttatcatgaagccggaccataagttatcgatttttgatgcccagaactatctcagcaaccactatgagagaaccgaattcgatccgcttggtcatggtgagcacgctcataagtaccggccaattagtttagcaaagacccaagagtcacatattttacagatgaaccgaccgggcgctaatattcactggttagcaatgggagtcgctgccgaaagtacctatgtgccattcttcaacggtattaccgatacgcccgccccgtataagcgggaagctaccggctcagctcaactctgcttactggattttcaagcatgccagtgtgctagttgacagccacctacacgattttcttccattattacgggatgtcagaaggaacgaaacgccgcggccattaagatgattgccaaactgattgtcgcctcccgagtctcaaaggagaagcacgagcaactttcttaacgcggcaaagcgacgactatgcgaccgatactttgaatgcttataagaagttagccttgaattgattaccaagatgactgattattgtgaattaaactttaatacagatgagaatctgtaaaataaaaaagaagcagctcctaagttggaatttccagcttaggggctgcttcttgtatgcacctaaataaacgaggatcaaagagttttacttcttcaaatcctcgtttatcttaattttgatgatgtttttcaactgccgtaactagttcttccaatgattgacttccaaaaataactgggtcatcatcaatcatcgtcgctggcaataatcttcttttttccgtaattctgggaaatgctgcaagtcaatcatcgtggcagtaattcccacattcagagaagccatccgttgacaagccgcaacaacatcaggagaaatgacaagttaaggaaacgccaatccgaatcttagtcggcgcaagtttcttaattcgttctaccatttctggtgcaattgtttgtccaggaccggcaacgttgtagacacctagaactaaggagtttaattcgtgaccagttggaatccccgcataatgtaagccagtatcattaccatccgcatcaagcaagcgcaattgtggtaagtactttacgtccgctggcgccggtttagtctccatctgcaggtgcttatcaagtgaagcaaattcttcaacaaagctaactaactgattgctaagctctgtcccattggttaacacttggagtttaatatccttagtcaaacgggcaaagattggttgtaactgttggtcaatctcagctggcagccagtttccttcatgcggcgtggtgttttcttgttgactaagttcgcttgtctgtcccacggtcttagcaggctttttattagtttctgcatgaatcgggataccttgcttttccttttgcaaaataatgtatcgttctgcagcagtagaagcaaccgccccatcggatgcagctgtcacgatctggcgaagatttttatggataacatccccagcagcgtaaacgccatcgatgtttgtcttaccattttcatccgtcatgatatagccccgatcatccaaatcaaggatattagctaatgctttcgttgctggttgcgtaccaatataaatgaacatcccaaatgtctggtcaccatcatcgacatggtaaaccgtctcttcgccagtcttattattaaccaaggtagcagtagtaaggtaatcatccccactaacttcctttacctcagtattgtattccacactaactttaggattatccaaggcacgcttagccgtcaatacaggacatgcaaaatgatcgccacgaactaaaacagtaacgtgcttggcaaagcggctcaaatagtcagcttcttcagcggccgcatatccgccaccaacgacaaagacttgaagaccggtaaaaagttcgccatcacaagttgagcaataagcaattccccgtccacgaaattcattttcaccgggaaaaccaacttttttagggttagcaccagtcgcaataattacgcttcgggcagtatatttttgaccactcttgccaatcaatgtcttaacttcaccagtaagatcaaacttttcaaccgcatcatgttgaatttcaaccccaaagctggcgacctggctttgcatctggttcatcaattgggtaccgtcgactttttcgacagctggataattataaaccaccgaggtcgttgttacctgaccgccgacagtatctccttctaaaattaacgtatccaaggttgcgcgtccagcatataaaccagcagataatcccgctggtccagcaccaacgatgattaaatcatataaatgttgttctgccatttagctcaccaaattaaagcttaccaactagatcaagacttggcttaattgaatcttggcctggcttccagttcgctgggcagacccggtcaccatgttcacgaacaaattgagcagcttggagtgtccgtaagatctcatcagcactccgaccaattcccatattattaattgtgtaggattggataataccatcaggatcaacaatgaagactccccggtatgcttgaccagcgtcttcgtcaagaacatcgaacatccgggctaacttaccagctgggtcagcaagcattggatatttgatcttgccaatcttgtcagaagcctgagcccatgccttgtggacaaattcggtatcctcagaaacagagtaaatctcagcgtttgctttcttgaagtcttcgtgcttatcttgcaaagcttccaattcagttggacaaacaaatgagaagtcagctgggtagaagaagaaaatactccacttacctaaaacatccttcttggatacttcggttgtttcaccgtcatgataagcatttaccttaaaatcttcaatttcatgtcctacaaagttcatgtatatcctctccttaaattagaatcattcttaactgcaactcttagtataatctttttatgctaatttgcaagtaattttagaataattccaaaaagatcaaatttccttgccgaagattttcgtcttaatcgcctgtccagttggggttccagccagtccaccgaggcctgtttcccgtaaatcaactgacattgaccggccaaccttatcaagagcagaaatacattcatcggccggaatcatactcgtacaaccagcgagtgccatatcagctgcaattaacgcgttcccagctccaatcgcatttcttttaacacaagggatttctaccaaaccggcaatcgggtcacataccaagcctaacaagttactaagagcaattgccaatgcttgactgctttgttctggactaccacccgctgcttcaacagccgccgcggcagccattgccgatgctgaaccaacttcttcttggcagccgcctgtcgcgccagcaattcccgcatgattggcaataattaagcccaacccaccagcagtaaataagaagcgaatcatctgatcttcactaaggcctaatcgttgttctaacataaaaagagcgccaggaagagtcccggatgaaccggcagtcggggttgcgcagatgactcccattgctgcgttaacctcgttagttgcgatcgcattttccacggcagccatcataacatcaccagagagggtctttccttttgcacgatattttttcagcttaatcgcttcgcctccagttaaaccagtttttgaccgaactcccagctcattttcaccttgtttaattgcggctcgcatcgtcagtaagtttgatcgcatccgttgccaaacttcttttcgattgctaccagattcatgacattctgcctcaatcactagttcggacaatgctttttgctgaatttctgcagttcgcactaaatctttaacactttgatacatcgctctttctcctaaagacaaattgcagccgggtacttcttttcaaaataagcaatcgtcgctggctgcatcggttttttaatatcgtaaacataaatatcacaatcatctgcccgtaatacttgtcgccgggtaaatggtgctttttcttccaaatcagtattgatcgccagtgcattggccatctgtttactataatcgcgaaagataacaattggtaagggacccgctggtaaaatatcaacaccatcaaggttaatagccctaatttcaattatcccgccaccgatcgaacaaccagcaaccgttaccctcgtcttatcaccagtcatttgaaggatggctgtgttaggatggtgaatcgggctttcaccctcttcttcaacaaagcgaaggtccattcctccttggcgagcaatcattggcgccgatggaactcgtgaatcgtctggcgcaaatcctagcaatcccgccgcaattgcatagtctgttccatgaccacgatgcgtccgagcaaaagatccataatagtgaacggttactttaggtggaaccgtgccaaaaagtttatttgcgactcgaccaatcttgaccgcccctgcagtatgcgaactagaaggaccaatcattactggtccaataatgtcaaaaacacttttatagttatttttcatgttgttgttcccttaaaaaatcgagtaggagataattgattagttcaattatcgacctctcacaccaccgtacgtacggttccgtatacggcggttcgacaacttaatcacattgaattgactggagcgtcttggacatattcataagtccgagttgttccagttttctattagttagagaatagctcaaggtcttactgtgtgcagttcgccagtagcccttgcgggtactagcgaagacatatgcatcacgctgggacagccccagcttctgtaagttagttaccttagttttaagcttcttccattgcttccagatatactgtcttattcggaccctcaaccacttgtcaaggcgttgaataaagtcagttagtttcccaattgagtagtactgaagccatccacgcatttttcgctgaatttcttcaaacattcttgtcagggatattccacgattacgtttagttaataacctcaatgctttctttactcgttgttgcgattgtttagctggacgggcgtaggctccattgtggtctacacccaacgaaaagccaagaaactttaaccgtagcgggctaccgactttggttttatctgggttcactttaactttcaatcgcttttcaagaaactgggtaatgcttcgcattactcgttctccggctcgttgacttttaacataaatgttacaatcatccgcatagcgcacaaagtggtgaccacgtctagtcaactctttgtccaactcatttagatagatgttcgccagtagtggtgacaatggccctccttgtggggttccttttccactcttagcgaaaagcccatggtctaagactccgctagttagaaacttacgaatgagtcttagtgtccatgggtcatcaatatattgttggagatacttaatcatcaagtcatgattaacgttatcaaaataggcttttaggtctaagtcgacaactcttcgataaccttgattataaagatctactacttttgcaatagcgtcgtgagccccacggtgagggcggaagccaaaactattatcagagaaaacacgctcaaagataggtgtaagaatttgggccacagcttgttgaaccattcggtccaccactgttggtattccgagttttcttactccaccattaggcttcggaatttctacccgtttgactggtgctggtttatacttgccctcacgcaaactagcgatcaactccgtcttattttctctgagatatggcagaaggtcattgactgtcatatcgtcaatgcctgctgcccctttatttctcttaactcgcaaataagcctgattaaggttattgcggtccaagactaagtcttggatagtgacactcatacctttaccttcaccataatcggtactacgcgcccttgtgtactttcggttttccaaacctatcctcgacaagcggtcagcttgttgttctgttttctgcgattgtcgcacctgattacacctccgatataagttacaagttgttgtcgttcagtccttcatctgattactcagactactatgacctcggctgacttctggcttactcaacgctacatcactgcaccgcttgtttctgtggaaattaaacttattcctcttgtcggaaacgtgtaggccagatctccccgggtaaggatattaactttcgtaccatgtcatcgttagctttactgagaccaacttcgagtagtattggacttcaacttgtctagcagccttatccagttaatttcagccttatagctacttcttgttcatcgatgcagtactttgccttagacttccttcagattccacctcacggtggacacccttgtccttagctcatggttccgactactacggcccatagcggactttcaccacctagctaatacccatgccgggcgcactaaaatagaggttgaaagaaaaatcatgtttttctcaacctcttcattataattactttttctttttatgaaagtcaagaaatgaccagaagccgcgatgaccaccagattttttcttcggtttcttttctgcttttcgatcttctttggcagccttttcagcaagtgctttttgcttggcgagaattcccgcttttgccgctctttttcagcctcttttcgggctgccattgcctttttagcccgtgctgcccgttgctgagcagcttctttcattaattgtggccgcgttccattgtatcaaacattgttgccaccttaatagctgccttattggctaaggcttgatcagtatttgaagccacttcaatattatgggctgccgtaatctcacgttcccagtattgttgtgtcttaataggtaaaccagcaaactcctggctccgtaagaactgacctgctcgtgataactgcatcttcaacgaatgcttatccgtttgctgaccatttaatgcttttcgcgaattataaatcgcttgatcaacaaggtcgaccattgcttgtggttcattatatccctctttatgctcttgaaggacatcctcccccattctaatggcttcatcataaagacccttagaacgatcagtcccattaaagtatttatatgtttgccttacacgtacttgatcagctacatctttacttagttgatcaaaaactactttttcgttcattagatttccaccgcccgactttattcgtctactattcttagtatagcagttattgatcgcgaacgaagctaaaatgtcaattttttagaagattatcgaaaaaggaggctgagaaaaaactttgttttttcaacagcctctttaatctatacgaacattatttaagatatcgtggaactagcttcgcgtcgtaaccacaaggctcaagtctaagtccgaacgataatcagcccgtgccgtgctaatcaccgttctatccttagcccaccgccttgtcgagaaggttaattcccactcactccttattaccaactagccttacgaacaccagggatttgacccttgtgtgctagttcacggaacttaatccgtgacattccaaacttacgcatgtaagcatgtggtcggccatcgtaacgatcacggttgtgaagacgaaccgcactagagttacgaggaagtttggataaaccgatgtagtcgcccttcgcctttaattctttgcgcttttcagcgtatttctttactaaagcttcttggtgatgtaatttagcaatctttgacttttttgccattaagtagttctccttttatattaaaaactttatctactatacaattactatttaaaattaaaacatctgcgaactcttttcattttaatattatcgctgatacttacaaaaaatacaaggattttgcattactttttgacttttcttaaccatttaattttttcgcgtatttacggtattcgtcagcataattgtattgattattatattcagttaaaagttcatcatcatgggtataagcccgtcccgtcaccatcatcttcttgtaaaggtcacggtatggcaaatcactcttatcggcaatttgtttttcctgatcgcgactatatccaatatgacggaagctagtttcagctaaaccaatatcgtctacttccaaaattagatagtgggctcgcaaatcacgctggagaggttgccagtggttgaatggctcgccgactgctccgggatttaaaaccatgcgttcatcactcccataccgtaaaaggtcatggtgaacatgggcataaatggcaatatcaactggttcgccagcgacattaaacagcttatcaaaattttcactaacttgcgtgggaaaaaggtcttgacccatattaagccacggcaaattatgagagatgccaaaattaaggagacccacgcgtttcgtaacgtgcatcggccaacttgcaatttcatcaatcattccgtcaggggcatgttccgcaacatactgggctaaccgtgcaaagtaaatgtgggaaggacgctccatatccatcatcccgcgagcgccacgaacaactaggtcatcccagtttcctcgtacaattactgttggcttcatttcttgcaaaatctcccaaattggttttacacttgggcctggcatcagtaaatcaccaataaaccaatattcatcaacatgttgcgctatgctatcgcgatacattgcctgcaacgctgttagatttccgtgcgtatctgaaaagactgcgatcctctttttcacagatgatttcccctttcttaccttcattaatatattagcaaattttcgaaaaggaatgctaaattaatttgtattttcagaatgatttcccacattacaaattattttgttacaatatacttttatgaacaaatcattttaggagatgataatcaaaatggattcggaagtcgcaagaggaaaatttcctcacggttggcaccgaactttttacaccctctggctcggcgcgttcatcaccgggatgggctactcgatgacgatgccgtttatctcactttttattgcagaattaggaaattttacgcgttttcagctcaacatttactccggactagcatttggggtgaccttcattagtcaagccattgtttcaccgttctggggcagtctggctgatcgcaaaggacgaaaactgatgtgtatgcgtgcatcgggagtaatggcttgtacaatctgtgcaattggatttgctcaaagtgtctggatgattattggcatgcggttccttcaaggagtcttttccggctacattaataacgctactgctttaatggctggcgaaacaccgcataataaatcaggctgggtaatgtcagcgatgactactgcgggggtggccggcaatttggttggtcctttgcttggtggtttcctatcagaattgtttgggtaccgaatcccatttttcatcaccggagcactaatgttttgtgtctttctcagtacgtggttattgacggtagaacattttaccccgattaaaaaagaagcgatgaagccaatgaaagagataattcataatctggataatccaccattgatcttcgttatgttcttaaccacaatgattgttacttcttctaccatgtcaattgacccaattatcagtttgtatgttcggcaattgatgggcggccacggcaatattgcctttgtcgctgggattgttgctgctactccaggactaggaacattgcttgccgcttcaaaggttggtcacacgatggaccggattggaccagaaaaagtattacagattgggattctcacggcctttatcctctttatccccatgaccattactaagtctccatgggccttggcattttggcgcttcttgcttgggttagcaaacgcggcgttaatgcctgctacccaaacggtcttaacccttgacgtcccaaccgaagcattcggccggatctttagttacaatcaatctttccaggctgcgggtgcggtgttagggtcaattcttgggtcattcatttcgggaatttctagttatgaaatggtctttgtcattactggtttgactctcctgcttaactttatcttggtgatgttggttagaccaaagaagcaacttacagaataacttaaagaaaagagaaaatcatggttcaaacaaataaattattaaatgaacacgaagtaaataacttattttcccgggttgccccccgctatgacttattaaacaatgtgattagtctaggaacgcagaaaatatggcgacacgaactttttaaccagcttcaaattaagcctaccgataacgccttagatgtttgctgtggaacgggagacctcacaattgccctggctaagcggatctctgctggacgagtaaccgggcttgattttaataaagaaatgttggaaatcgctaaagaaaagacaaagatgattggcaacctcttcttggtacaaggggatgccatggcgttgccgtttgatgacaatagctttgatatcgtcaccatcggctttggcttacgaaatgttccagatgcagataaggcgctcagcgagatttaccgggtcctcaagccaggtgggcaattcgttagcttggaaatgtcgcagccgaccaatccaattattaaagtcggctggaaagcttactttacggcctttccattgatggcttcattagctggtggatattaccgcgattatcaatatttaaagaaaaccagccaacaatttgtctccgcccaccaactggcgcggatgatgaaggcagttggatttaaggaagtccattaccaaccattgaactttggcgcagctgcattacattttggcgataaatagaaagggagcgaggtagaagtcactcatgactatctcgctccttttcaaattattaaagaataatattgacaacattaaaaactgattataatatactggcaagcaatttaataaccgcaatgaaaagatgagtaattgatggtcgccttctccagagaactgcggatgatgggaagcagcgttggctaagttagtgaagatggtcttggagcgataaaagttgtgagctatttgtaagcagcttacgggttggtgtacgatataacacctgagtattccctttgagtacttgtagagagtttggctgtgaggtcaagctaaaatagggtggtaacacgctatcaatgtctaatcattacgcgtccctagaactaacaagttagttctaggggctttttttatttcacgaaaggagtcactattatgactgaatttactaagagaaccacatcaccatttcgctttgatattgttggcagtttcttacgcccaaaagaattaaaggaagctcgcgctaaatatcaggtgggacaaattacgaaagcagaattaaccgcaattgaggataaaactatcattgacttaattaagaaagaagaagcagccggtttacacgccgttactgatggtgaattccgtcgtagctggtggcacctcgactttatttggggattggagggaattgaacagtcaacttctaatgcaggatatgagtttcatgatgaaacaacaagagctgaaacggcaaagttagtcggtaaagtaagcggaaataatcatccttttgttgagcactttaaatttacacgtgaccatgttagtactggcacgcaagttaaacaaacaatcccttcgcctgctcaagccttctttgaatttttgtgcccagaaaacattgctagcgtcattgaactactcccacttagctaaacctacggtttaatgcttgaagtgggagattctggaaacatcgcatacttaccctaccgattctgaacgaaccttcaagcagaggttacgactattaaccaaggctcgtcccgagcctaactttatctatcggatagctaatcctttttgcaagatgacttgtgcagcgttaatatcacgatctaaatgtttaccacagtttggacaatcccactcacgtaccgctaaccattccgatttattcaatcctaaccgatgattattcttcccacaattagcacaaatttggctagtatatgacggattgacctgaataagctttttaccgtaccagtcacacttatattgcaacatatctactaattttgaccagctagcgttagcgattgctctagctaaatggtgattcttcatcattcccttagtattaagtttttccaacacaatgatgtcgtactttttgaccaatttagtagtgaatttttgtagctgatccaaccgttggttggcaatcttttgtcgatacttcgccaccataatacgagctttctgataattcttaaaatcatctaattgccgtggaactaacactttattatgatgatcccaggcgatttcctgctgggcctttaagaaccgacgactacgcaatttctcccaacgatacaactttttatggtatttgtcttcaaaatgattgattggttccttgcatccatctgaaagattaagtaatgacttaagtcctaaatcgccaccaatatatttacttgttttaggaagagtttggttttcgctttccactaaaacagtaatgtaatattgaccagcaacgttcagacgaacagtgacattcttaattttacccattggcaatcgaccagctctaaaatagacgataccaagttttggtaactttatatgatggcaatctaaaactttaatattgccattaacgtactttgaattgtagctctgagaatattttctggatttaaatcgagggaacttattttgacctttaaaaaagcgttgaaaagcatcggctaaattgcgattagcactttgcaaagcagttgattctgcttgtttcaaccaaggatactcaaccttaagttgtttcaacagattattcatcccaaaggcattcaaaaatttagcttccggattattcttgcgccgtttaatttgcatattaagcatttgattccatacaaaacgaacacaaccgaaggtttgccagagctgatttcgttgtgctgaatttggatagatgcgcattttaacggcttttaaaaccattattttctcccttgactttcaatatatcgttttaaaacttctaaaggcgctccaccagtgctaattaagcaatagctttgtgtccaaaaagctgatttccaaagatactgcttgatttctggaaattgttttttaaccattctggagctagacgatttgtaagcatttaaaaatttagccatttccgtatgaggcgttgctctaaacaaaacatgtacgtggtcctgatcatgattccattcttgcaaattaatgccgtatgcttgtcccacaactacaaaacgatgtttaagatattcagatatttcatcgttaattacttttcgacgatacttaaccaccattaccaaatggtaattaagtaagtatactgaatgctgatttctatctaattctattgttatcaccacattttatagatatatatactaaatatatcatagaacaaagaaaaagcactaacgtgctttaagagagcgattcatcccctacttatagaagtgggggtattctcgcaaatttatggataaatgagacctttgaacaaatctcctttaactctgctttcttttaaattagcccaatcgcaaacgttacgacttgaaccagtgagccaattaataatattttaactgcacatggaaatgtctctttcttaacttgcttagcaaataacattcttgtttgcttaaccacaaatgggataatcaataaggttaacaagactgtccatggtacgaaatgaagaaccgcggcgaaaataatagctaaaaatgctaaaacgttcttaatagcaaatgcatatagaccatttttctgcccaataaagtgaataactgtatgacggcgattgtcttcatcttcacccgcatcacaaatattatttgctaataataggttggaaatccacaattcatccggtaaagcaacgagaaagacgaccccgatatttgcccaggaccatgtaaattgctggccaacattaataaagacagaaataagggtaatcatgaaccccattgtaaatcccgaggcaaattcaccaactggcaaccctgacaaaggaaatggaccagaagagtaaagaatgccgatcgcaaaacaaaagattcccatccatagtaacggaaggccaacacgagtaactagatagattccgattaagccggctactatactaaaggcaagcaagagaccgagaactaaacgcggtgaaatattttcccgcccaataatatttgtatttttcttataatcaacggtatcaatggcatggttataatcattataattatccatcatatcaaccgccatattgaataatagcattgcaatgaaaaacagaactgaatttagtaggtttagggaatgataataatagacactaaggcaaaccccgaggagcatcggtaagatactagcagttttggccttaatttctactaattccaaaaaaacatttaacgacatttagtaaattttcctttcataattccttagttgttcggtacaatatagatggtacaccataacaaaggaattatcgattaatgaaacaacattttttccatacctatccggcgattaataacgctctaggtaaagtaaatcaaacaattaatgaccggattacaattaaaaatacccaactacacgatgccctacaacaaatggcctcaaatggtggtaaataccttcgcccagcattcttccttttatttgcaaatatcaatcatcaaactgccgatgagcaagaaagactaattaaaattgcctcttcactggaggttttacacatggccactttgatccatgacgatattattgatgattcacctaagcgtcgcggagccgtcagtgtccaagccgcttttggtaaagatacggctgtctatacgggagacttcctttttactatcttctttgacctcctcgtagaaacgatgaccggatccccctatctgacacgaaatgcccggacgatgcgcaaaattcttaccggagaactaggacagatggataatcgctttgatcttgaccaatcattactcgattattatcgcaatgtaaacggcaaaacggctgctatttttagtcttgccgctgaagaaggagcctattttggtcataatgatcgtcggactatcaacttagccaaacgaattgggcaaaatatcgggatcagcttccagatactggatgacatccttgattattcaggggatgaacgccttaacaaacctgttttggaggatttagcaactggtgtttactcccttccccttcttttaaccttgcaaaatcaccggcatgaattagaaccgttacttgcaaaaaaacgccaaatgacgattgaagatatggaaaaagtccaaaagattgttgtcactcatggcggtgttaaaaaggcgcaagaaattgctactaagtttacacaaaaagcgcaaaccgaaattgatcaattagcagataagcatacccgaaagatgttgaagttggtagcaaagaagttattgacgagagtaaattaaaaaagataagactaaggaaattccatttctcagtcttatcttttttattcttgaaccaagatctcaacatcccacgaatcaagcatcgtttcaggaaaatcgccagtcaaaaggtctcgatatcccttttgaaattctactggtaatggttgtttaccctttcccatattaaggacaaagtaaatatcctgacctgctgaattttggcgttttgttatctccaattctgtttgctctttgactaacgcggaaaggtgcacatcatcaacaatatgcataatgatcttacggagactagcatggtcaaggcgactaccaacataccatgctttcccttttgaataggtattctcggttaccgcgggagtccctgcataaaattcactagcgtatttagccaggacatgggctccattaaggcaaattaaatctgctattaaatgtccagttagttcattcccggtcgtcattgctaatttaacatctttatcaggaaggattgcatcgctttcttcaacccacagccccattacatcttttaatggtccaggataaccgcccggatagatattatcggattcatttaccattccggacataaaactagtaataaaattaccaccgtttgcaacataatctgtaatcttcttgcctaagccatccttaaccatgtaaaggaccggagcaactacgaggtcatattggctaaaatcatcatcaacggaaattacatcaatcggaatattcagctcataaaattgccggtaataattaagaataattggtacatattttagggcctgggtaataccatcgacatactcaaaagaccagaaattactccagtcaaagataagggccacccgcgctttagtctgagaatctttaataaccgggcccacttttcttaaatcatgacctaatttcgccacttctttaaatgcccgggtatcagtccggttggcgtgactaatcacagcaccatgaaacttttctgatccgcccagtgcctgcttcaactggaaaaattgaacagtatccgcaccatgcgcaactgcctgtaattcagtggccgccatctgtcccggacgttttaatgggctatatggttgccagttaacttgtgatggcgtggattccatcagcataaacggctggtgctttaaagaacgcatcaaatcatataagaatgctggctgataaaccggtgcatcataagacggataactatcatatgatataatgtcttgcgcactagcccactgctgataatcaatcattttattgggcagactatgaaagttagtagtgactaaggtcgttggatcatacttttcaatgatttgcttttccatcttaaataaatcaagcatttgggtcgattgaaaacgtaaataatcaattgaaagtccggcgacaattgtttccgatccttctgggccccatgcatcaccaagttcattaggcacaacaatctcattccagtcataaattgtatgactccacacattcatattccatgcatgattaagattatttaaggtttgatagcgcgccttcaaccattgctgaaattctgtttggcattcttcacaataacaattgccaccatattcattattaacatgccaagcaacaatatgcggattatcgccatatcttttagcgagctgttcaacaagatttttcgctaagcgccgataatttttactgcttgggcaaaagttatgccgggcaccaaatacatggcggcgtccttggtagtcgacccgcgcaacatctgggtatttcttgaacatccaagcgggcatcgcggcggttgaagtggcaagaacgatatcaaaatcagcagccgttaattctttgataattttatcaagcttggtaaaatcgtattttccttcctgcggttcaagcaaaccccatgaaaaaacattgatcgtggcggtatttatatctgcccgcttaaatactttaatatcttcagcccacgtttcttctggccactgttcgggattatagtcgccaccatataagaaacgaggcaattctttcttcatcattatctcaccttatttaaattctactgttactaccttatcaccatgcttaataagcttaccgggagtaaaaccagccgttgcttcaatattatgtggttgcgcaaagaaagtaattacccagtcttcgtaccctctttgtctaatcaattcacgatcaaagtcaaagagtagctgcccctttttaacgatttgaccgtcattataatgggcattgaagccttcaccacgcatgtttacggtcccgacaccaatatgaacaatcatttctaatcccctgtcagaagtaataccaaacgcatgacgggtgccaaacgtaaagttaatcttcccgtcaaatggggcgtacaatttatcgctagttggcctaatcacaaagccctttccggggaacggttgaccatcacgatcgacgacttctttcattgcaactaattcgccatctgttggggcataaatcgtttcttctttaagaccagtcgatgatgtcgacgcttcacttgtcagttctccttgtgctaatttatcctttaattcttcaactacttccgcatgaacttcttcactcaatttcaccttaaaaagaaagacaaaaattgacaaaatagctaataccagcgggatatagaatgccatactatcgaaagtccgaatatcatgacctgtcatgtcagcagcagtcgcgctccccgtcattccggctgcgattgcgatataaccgacaaggccatttgagatcgcccctgttaatttatcaatcattggtcgcacagcaagaacaaccgcttcatttcgttgaccagaatttaattggccatattcaattgcatccgttaatgttaaaactgttaccaattgggcaaaattaatgttaaacaagaccaatccaaagtccatcattaaaacattagagcgggcaaaaataaagattaaatatgctaaactcatgcagacttggccaccaatgaatagccattttcgtggaataaatttattcaaaataggataaagaggactagtacagaaaccaataatcgtagcgatgaccccaacaatccagaattcaccaggtttaccaataacaaacttgtaaaggtagaaaaggacaccattagttacaacataggcacatgaataaagtaaatatgccaaacttggccataagatttggtcattgtgaaaaattgctgaaaaaacttcccgaatagttgtcttatcctgggcagacttacggatcacattgtaattttctttcgtcccaacacaaacaaccaaggcacagataacagctaatgccgaaataatggcagcaaaggcaaaccaaccagcaggcccctgccgatgatgaccagtagctaaataagtaaaggtcgttacaatcggtaccacgataatcgttaatccattccaaccaagtgttcccgcaaaggcaccgagagcggtataaacgccccgctcttcagaatcttcacttaaagcgggcaccattccccaatacgaaacatcagaaaattagtagaaaatatcaaacgtaatgaaaataataacaaataaaatggcaaaaagaacccaattatattttgctaagccaaagattccggtaaagaggattaatagcagaatcgcactaacgatatttcccattaaaatccacggcttaaattttccccaccgacttttagtattatcaacaatatttcctaacagcggatcaattaataattccaaaatccggacagaaacaatcaaaccagtaatcaacccaattagtttattagcaaccgttttgtttagtcccgcgaacattccgcttgttacaaagataataaagtaagtactcattaccccataaaatgcagagtgtcctaagttaccaaagcaaaacgaagcacgagaaataagctgcttccccgtgagcttatggctatgtgtcatatttataacctccaaactacagctttctgtaatcgcttacaaatatattataattctttagctgatttgagtaaacatttatttaaaaagtaaattcattactagcgaagatataaaaaagtagctaatccgtgaatcgctgatacgaatactgattagctacttattttctttgggaaagcttttacgaaaaacaatattggtatttactgtcagatgaacgtgcggacgctgggatgggttattaaatcttggagaaggttaatcgccatccgactaagcgtttcttggttgatattgtatgacgttaacggcggtgaaacatacttagcaactttactgttattgatgctaatcacgacagtatcacgtggcacaattacccctgcttcattaaaagcctggagaacaccaacacttaacgtatcagaggcaataataaaggcttctggtaaattaccaccgctttgttcaagaacccgtttaccaagttgataaccgtttttaacattaaatggtccgtccacatataatggcgcttcttttatcccttgcatccctgtaaattcacgaaaggcgatttcacgggcatcagcttgttggacgttattgagattaagtccttttccaccaatgaaaccgattcgttcataacctgctttggcgaggcgatggagagcatcctgaatcgttaattcaaggttaggttgaacggaatcaaataattgtggcatcggatttatatcaacaaaaactccatgtggtaagtattgatgaagttcgataagctggtcctgcgttacccggtccgcacccacgccaataaatccttggaacgaatcagccgccgcaattaaatctttgatattactaaagatttcaacttgcgctcccgcctcatcgacttctttaataattgcattgcgcaaaaacgcaaaatattcatcttgcagttgttctttaccgcttacccgatacaataatgcgaggttaggacggattggttgctgctgagagtttttcttgtggttgttccaatagccaagctcgttagccaccgtcatgatcttattgcgggtgcttggactgatcgataaattttggtcattattcaaaaggcgcgataccgttgctggtgaatatcctgatttttccgcaatttctttaattgtcgccatcattttcacctcttttagtaatgggtttagtaaatattatacactagtttgaagatagagatgataattcaatctactaattttattcttaattattttcccttgtttatttcccttaaaatgatcataattaagaggacgagatttattgatgaggagatttacattatgaataaagtttctaagggcccttgtactcgctcttgccggtattactgttggaactagtactggacttagcactaccctttttcaatcaaccagtgttgcctatgctgctgagatgacaaaggaaaaaatgatttagctaatcgttatattgctgattatttaggcaactgtcaacagtatgagcagaatgataaaacattcaaaggcttttcttcaatcaaggatattacctattcgcgagacaataagattaaaattgacgttaatgatgacatttatcaattgcctaaagcacgtcgttcacttttgattcaagatttgcaaaacggtgtgtacggcacattagcagacaacgaccttaagaagttatctgaaaaagacattcaaaagggctgtccaactactgtttacttgaatggaaaagtaattggccacactgccaagaatgataaccaccacattatttgggataaataacaaaataagagatttgggacaaagctggtgttccaaatctcttattttcatttaaagatcaatttctagaataattggcgtatgatcgcggcgttctccactatcgatcattcccgcttctgtaatcttatcagcaagccggtcactgactaaccagtaatcaatccgccagccagagttattttgtttgctggtaattacccgttgtgcccaccaagaataaactcccttttcgtcggggtggaggtgacggaaactatcagtaaagccagcagctaatagttttgagaaatgcgtacgttcttcatcagtaaatccagctgaatgatggttggttgctggatgagctaaatcaatctcttcatgagccacattaaaatcaccactagcaattaccggtttttgctggtcaagttcatgcaggtagtctcggtaacaatcatcccacgtttgccgctcatctaaccgtttaagcccattgccggaatttggtgtatacacttccgtaacatagaagtccggaaattcaagggtaatgattcttccttcatcatccattggttctggcgcattaattttaggataagttactttcggctcatattgggctaaataaaggtacatggtcccagcataccctttccgtgctggctcaacggaacttcgccatgccacttcataattggggaataattcttgtaaaaccgttaaatgcttcttagttggcccattctttgacaacttggtctcttgaatggcgatgacatctggcttcatcgctgcaatcttttttaatacttcccgcgtttcccctgcccgtacggaagttccagttagtgctgcattaattgaatcaatgttccacgaaataaatttcacagctatttctcctttttatttcttgatttaaggtcgctttctttgatgaataccccatcggcagttgtcttacccgttcgctttgcaatttcttgataagctgcggtaagtgcttgttgatggtcaacacccactaatttacaaaagattagcaatgcaatctgtaagtccccgatgctatcgataagcttagtccgattttccttattatacgcactcgaaagttcgccgagctcttcagccatcttcataaattcgacacgtggatccgcgtggtcaatcccacgttcatgcgcccacttatcaatttttgaaatagctcctcgtaattcatcaaatgtcacctcatcaagtgataattctagtcttaactataaaataaaagaactagctacgcaataagaaaatttcacgtaagccttcttaacagtatttatcaatcaccgctgttataattattgctaagggaaggaagtgaaagaaatggacttaaccaattatcgaatcgatcctgctaagtttgctttagcttgcgtgcaaagttcacctgatcttaccactgaagacaaattaagggtttacaaggaagtatatgaagaagcgcttactttctatcaccaaattcaaacagccgttattaataaaggtcgttcaaaggaagatcgcagccttaaggaaatgggagactttttcgatttaaagaactaaaccaatcaccgaaatcactacctatcaaaatctcccgtactacattgatggtgaactactcggccataaatgaccgagcttctgggaacacgaagtagtatttaggatattacacaagtattcttgctacctaacttacagaactccgttcttttaccaaggctagttcctagccaacggcttttaatcctttttgcaagatgttaactgccgcattaacatctcggtcgtggtgaacgccacactttggacaagtccattcgcgaacttcaagtggcttcttgccactgttaaagccacaatgcgaacagatttgactggtatagtttggtttcaccaagactagttgtttgccataccaagcacacttgtattccagcatcgtccggaactgataccaactagcgttagcgatcgacttcgctaagtggtgattcttttggagattcttggctttcaaatcctcaataacaatcacgtcgtactgcttaactagagccgtcgttagcttgtggaggtaatccttgcgcttgttggcaattcgttgttgataatgggctttaacaagtcgggcgcgttgccagttctgataatcattgagtgctaacttggtatcttggtggttgtgattccattggcgaacggcaacggttgcccggtggcgccgcttgctgaatttactttgccacttcgttacttgatgttctaacaatttagcgttgaaggtaccgtacttgacaccatcagaactaatcgcaaggtcggccaggcctacgtcaagcccgaccatttgccccgttttcggtaaccgttcaacggttgtttcaacttgcagggagaggtagtaacgacccgtcgggtcataactgaccgtataacgcttaattttggcctcaccaataagagtcgttttactcgtgcgtatacttccgagttttggtaattgtaaccgccgcttggcaagtaccttgcacgttgatcggccagtgtaggcctgataggccacatggcggctcttaaagcggggatagccaccttggtgcttaaacaatcgtttaaaggcctcggtaagattatggttcaccactaggaaactggtggaatcactttccttgagaaagggatattcacgcttgagctgtttcaagaggtagttcataccatactcattgacgaagtggctactgggattgttttggtaacgctccttagccatactgagcatttggttccaaacgaagcggtcattaccaaacatttgccataactgatcccgttgggattggttagggtacaagcgaagtttgatccctttaatgaccttgttcattctagttccacctcctttttccgttgatcatcaatgtacttggcaacggcttgttcattaacggccccaatactttcaacatagtaactgggcgaccacaagtgacggccctcctttttccaatagcttcgctgtaattccggacattcccgaaatagctgataggcagtaccgcctttcagccaacgaacaatattcgtcaccgataatttgggtggtgcactcactaacaagtgcacatggtcgtccttcccaatttccatgtgggcaatttcaaagccatatttagcggcgatctcatggataatccgtttgaaggcgatctcgacccgaccggtaaggactttgtttcggtatttggttccccaaataatgtggtaattaaggttgtagaccgatgttcggccatatgtaagtctgtttgtatctttcataccaacgattataccataattcacgtttcccatatacgcccgtcgggcgtaaaaaaggggggcaattcatcacgtccttaaaagaacgtgtttccttgccccttttcaaaaatgtttttttaaaattaatttactttgactagggactgtgacataagttaagttactttcataaaaagcaaatacgcagtacaacgatggcctctaacgtccggcaaaaccgatcgttagaggcctattgttgcttgcgggggctccagaggctagcttcgcgtcgaaaaacgaagtcacaagtgacttttgtctcgctcccctttcctacgattagtcaagaaaaatatttagaaaagaagagtatactaaaccaaccctaaatttcaagaataagttagccactggactcaaataaataatactgaccaattgattattggttgatggagctgtgatatctcttggtagaaggccttacgatagatatccattgacgaatgtccattaaacatagctcgtggatagtgattcatccaatcattagtcgctatgatctgagcactactatagttatttatagcttcacctttggtaatctccttgcggagaaaccggttattgatctcattggatccacgttcccaaggggaatacggatcagcatagaaaacatgatcgtgaacttgtgttaactcactaaattctgaaccgttgtcagaggttattgtcttaaagatgcgatagtaagcatctgtgcccattttctggcgcaaatttatgaagaactgatttactgcatgcgcagttttaccagcaattttactcgtgatattaactcgtgaaaggcgatcagtcattactagtacaacactgtcattaccgtttttctgtccctgaactgtatctagttcccaatggccaatttcggaccgttggtccgcagtttgaggtcgttgagcaatattaggccctaagcaccttttagcttgcggatgagttcgatgatgcttacgtttaggcttttcaaagaggtctaaattggacgtacgaagcacaccctcattaatccattgatataaagttacaaccgactttgggatcagggtgccatcattcattaaatctcgagccttataaataaccgcttgtgggagtaatggtggtcgtcaaactcaccaagcattagctgatcagctaatcgtaaaaattgctttgaagaataatataagcgacgacgaccagaatggcggtgatgttcaagatatgtggcctgaccagcttcataactatagatgtagtaagaatattcgtaaatcttaccattagatttttgacgacgaagttggcggaccgtaccacggttgagctcgttattaattgtttgatgattaactcctaattggcgaccaattgcgcgattggaaagtccttgcgactttaaagtcgcaatcatcacacgttcttctttagtaagatgagcattctttttatgagtagtcaataaactagtagacatggtatcatttaagtgcgtcatttgacggacatcctttcatataggtttggttcacttaatatgatacctgatgtcacgccgaatggcgttttttatttaccaccaactgggtggctaacttcattctataatccaccatactaaaccaactcggttcttcttcaaaaatcgagaattagtggtatattaaaattgtgaggtgattatgccttcacagggaccattgagtccgtataccgatagtagtatttttcatggtgcttaatcatggataagagacatttcagagttttattcatacaagctaccatggcgaccttgttcagttttggatgaggtcgtttttcttttaaacgatagtaatagtcaacgatatgattagaattagcgtgttgttggcggatcatattacctacagtaaaatataagagcttacgggcaatcgggtttccacgcttattaatgtgatcttgacctaaataggttccagattggtaacgacgaatatcaattccgacaaaggcattaagctgattggcattgtcaaagcgactaatgtcgcccaattctcccattaactgagccgcagtttgtttcccaattcccggaaaagagcagtataggatatactctggtaagcgctgggcaatagattccatccgcttgataacctcttcccttttacgggttaaggcaattaattggcgagcatagtagcgaacttcatcaacctgaatggcatcaccagaaacgccggatatgatttttgggcgagatcgattaatcgatcggcatacttataagctttcatcttagatattcgtttatctgtagatgccattagaatattctttaatttaactctcgaataaggcctaactagtgctgaatgaggaaaaagctccacgatattcaacgctaatttagatgttctatttacaaataattgcttaagttctggaaaaacttgttcaagtgcagtatgaagatgatttagacgatagttccaatcagcattgagctgattatagaaccgactaagctcatgtaactgaagatagtcttttttccaaggaactgttaatcgaaaagcattttcctggacagtgagcgcaatccgatgagcgtctttctgatcggtcttaactcgtcgtagactctcggactttaaatgaagttctagtggattaagacggcaaaagcggagaccattggtctcacagaaatgttcaattactcgcgaataaattccagtcgcttcaaagtagataattggcttctgagctttcttaatcatatctcgtagagcattaaaccccgctttcgtgtgtactaaagaaaactcctttaaacagtgtttccctcgataccagacacagtagcttttccccattgaaacatccaaggcaaatatatcagccataaaaagacttcctttctataaatagagctagatataaccgctatcctagatttgtacttcatttcctaaatactcgaactcgtagtttcacaacctaaaagcaaaatatcaaatcaaagatagcggagatcattttataatacggactcgaagtccctgggagcatgatcgatcttagctctatcttcagaataacaaaagagtccaggacaataattatttttgtcctgaactaatcttaggttgtttaatttaaaacaaaaaaagaacccttgatacataagggttctgcactactagttgtcgcgacgacgttcagcgatacgagtagccttaccagtacgttcacggatttgctaagctgtttcatctgctattcatgaagtattcacagactattcaattagttaatttaaataggtagaaactcattaactagtcatgaagtattcataaactactcacaaaaaaactaccaactacctaccagataattaacggcatctcttaatgaggtgtcgttttatccataaatttgcgagaataccccaacttcgacaagtgggggatgaatcgccctctgatatgatataattcaactaattaaactggttctaatgcatcgaaaataaagctgttaacattgcttcaccatgaggacactgagtaatttcgtatagagtaacttcgagtttgtgctgagacaacgccacgagttgcaatcaggctaaaaatagctggcgaaaaccaagccagtatgtattttgaacacgtacttaggcggtagtccgatgaaactactaggcccgggacgggccttggtcaatagtcgtaacctctgctcgaaagttcacttagaaccggtagagtaagtatgcgatgttcccagaatctcccacttcaagcattaaaccgtaggtttagctaagtgggagtagttcaatttcattataactccgatataattttcgcgctaattctatattaaatttaaaacaaaaaaggatgccgattaaggcaccctgtttaccggtacggattaagtaacgaactgaatccattttgcatgccggtacttctcatctgatgtgtatattatagcataaataaattatggtacaatactattgcgtgtcgggagtaacgacccaaacttacgcgcaaaaggggtgaattcccctatgaagtttgtacttctcattctgatcgtgccgaacgggctcgttaagcaactactacattctgtaagggttgcaatcaaaaaggctctcaaacacctaattgaggaactacttggttaaactccatttaattccaaaaggaggtgggcgagatgctatttcagcggtggtaattcgtttactatcgctgtttttattatatatcaaaaaagccctagcagtaattgcatttaaaagcttgcaactactactaggatttttttctacttatttaaatgtgccaaatggttggttattatttgcatcacggcaaacaagataaccatattgattatttggacgtggttgacgtaaccacacgtaaccatcgtgacgagaccatgcatcatacttaatctcactattagctggcaatgtagcaattaaggcactatttgtcttagcgccccagcgtaagttaattgctgtaccagtaataaaagtacctttctcagcaaaccaacgatcacccatatcatcaacccagtgattggatggaagctcagttgtaatagctggcgtttcctgctcaattggtttatttggttctggcttcggtgcttcacttggattaaagagtttaatagcattgtcagttaatgtaatagaaccatcaacattgtatccaagcagattatctgtgtgttgccacatatcaacataatttgctgatgggaagtaattgaagtcaggattctttccggctgctttcccattagctaatggatatgccgctaaccagaacatatccatatttggatgaattgcttctaaattaaagttaggcagtaagtacttgtaagtatagaacccagtgtggaaaccagcgttccgaacagtattaaggaatgcaatcactgatgatgttggcatgttagagatttcagcatctaaaatcattaacgtaccaggttgtacattagcttgtgcctttgagttagcaataaagtagtttgcttcggccaccgcttgcgcatcattatggaaacgaccaaagtgatagaaagcaaaccctttaattccaccgccagcacttcgatcaatcaaagaacgaatgtatgggttaacataattaatactttcagttgtcttgataatcgcataatcagcgccaatagccttataatcatcaactgttaaatgactttgaaaacttgcaaggtcaattactgttttacgttctgtcatattatttttcctccttatttcctttataatcaccggttatcttatgaaaatcagctggattgtagtcatcttgagccttagcgacattaagtactttggctaacgagtcaatgattggtgacaaccacggaacttgtatgtccatctgatttaaattttcgacaattgataccaagtattgatagcagaatgtcaataccattacttgtgcaacataatcaaaaccgattgaaattagatatggataaaaagcaagcactccaatcataaggataaaattctttgccaatccatatgtccctttggtcgaatttgttcgagtagctgtgtgattgctacgtaagcctttggcaatccccgatccaatatcaaataacacaagcaaagtaaatccaactattaatggatcgtcaatttgcttggctgcttgatgtaatgctacttcatgataaggtagtgccattaataataagtgcattaaatttcgttcccattccctttctaaatgccgcccataagaaaagccctgaattcggtattctttaaacactaaattctagggcttatttatgtattgtttatttccgaaaggcgacaagtgcctttaactattcatttgttttatctgctgtcttatcagcagaattggcgatttcatcctgtgcattatataccaagttttgaaaatcttgagtatcttttcgtactaccttcttgttagcatcgtacaactctttattggtgatgaaggtattaaaagtatcattaccagcatcgtcatcaaatacatttgcagtaaagttagcgattacttgaccatttactgtggactttcctgttaaggtgattgattttgttgattctaacataattacttatctcctttttcatcgttttgcttcttaagttcttctaattgtgatttcaattgactattttcttgttccaattgagtagcttttgcttcccatgaggcagctgtgtaattagcaaccgccaatttttggttaagactttgagctactaagttcatatcaatattgttcattattaaaaactcctttaactattttcattcgatcattttcgtaccccttacgcttagctttgatttcccaagcaaaatgaatattagggttgctagatttaactgtaaaattatttgctgaacgtgaagaaacccacacgtttccattgccatatggcgttagaaacacttggtatggcaccaatgtattaactgtttctaagaaataaggatcaatcatgacagtaactacaccattactattagtttgtgtttctccaatatcgccaaaataatattcggcggtttcataggcgttaatggctgccatccctcgcgatgttggtacaacggcattttttgaaccagtaacagtaaaattcccactaacattaaaatcactattaaccccaggaaataatccatttaacgataagatacttttaccattagctgtaatattaattgctccatcactattaatagaaaaataatttttcccatttaagcttcctacattaacaaattcatcttgtaatgttattccccagaaaagccactcgatggtccttgaaagaaatattgtgagaaagtaccttttaaaactgtttgaccattttgatatgttccatccaacactaaattaggtattgtttttaagttattattttgaattggttcaccagcataaagaaaaagttgcttttttgcagcgatatttataaagccatcgcttttaccggcaataccagcaccaataatttcattcccatttaaataagataatgtttgatcgttccagccatgagttctaagtagaaatccatccttaccttctatatctaaacctgatgttccaaaaaatacaatgttatcactcttagtaatacttccataatctggatctaaaacagcatctgaaagagattggcttttgtgaagatacaagcctccatcaaaaaggtaagctccacttgaattaccataagcgctaatagaccctcttgaaatccaaacattattaccttgattgtcataatcatgaattccgtttttatctatccaggcattatgatcaccttgccaaacgtgaagtgctccgctatctaaataaaattcaccattgctacctcttaatgtcccggcagtaatgttatttgcattcaggttgatgacattgatccgaccggcatctagtgttccagcagtaatcttgtcagccgaaatgttagttatagccgcatcggggataaatgctttaccagaaaaaatagttgaactggcgtccatgtatatcttgtcattttgaattaaggtggtgccggctgacatgttgatttgagccataatatttccgccagttacggttcgttgccaactggtccaattatctccaattagtaatctcgtatagatttcattttcattgttgtctcgttgccaagtctgcttaatccgttttacatctggataagctaccacttgaagataagcccacgccgatgaatcaggagtattgctattaggtactgcttgaatccaatagttaccagtcgttttgtaattattagcatcaattgcagatgtaaccttttgccaggctgtttctttgcgtaaggaattcagcgacacattaaagttattagcctgctgatttatttgtgtctgcagaccacctgttttgtcagatacttcttgacgaatggccttagctgtctgactgatttgcgattgaaggtcactgtgattacttgaaactgtcgattgaaggccttgtaatgttcggttcaactcactatattctgaataactagctgatctttgccactgagtccatgaatcactaaatttagttcgtacataccttaatgttggatcactatcagcctgccaagtttgtacaattcgaccatcattaacccgctctacttttaggtagcaccaattagttccaggtacgttaatgttatctgttgactgaataaaataatttccagtattcgtgtaatcatttgcattaattgcattattgactacttgcacattggttagatgctcaagactaccaactcggccaattacactattaaggctattagctgttgatgtggttttattgtcaacgccatttattcgatcgttaagttcggtccggacagcagaagcgctttggctaatttgcgtttgaagttgcccgtagttgccactaacagttgagcgtagaccttcaagcgactgggatagttcagcaaaagctattgtgttgtcagatggagctggagaccaaggtgtggctactgagccacgttctagtttataagatccaacactaaaatttggtttaacatttggttgagtaacaaatatctttacgtcttcggtttgattcaatgtgaaaggatatgaatatctcttccagatagtcccatagttttctgtttcaatatttacgatagctgagttgtctttttgacgctgaacaattacttgcattggcccttcagcatcacccttagcattccagctaaacgtatacgttccaggctctagatgcttcttcgccatgtattgtgtccacgcataattagtgataaagaatttattgccactgctatctttttgcaaattatctgaaagagacaatctaccatcacgatcccaattatcaccactaaaatctgctgttccagttaataaattaactccaccaccactaaacattggaatggtagtttgctgaactttttgaagaaatccatcagccgtctgcagaaagcctgaattagtaagaatattacttaatccttgccagttaccatcattgcgaatggtattgattgcatcattcttagcagagttagtccggttatccgtttcggatttggtgtagtagctactaaactgttggctagttgcattaatccgtgatgatagctcagttagactgtgttcagtgtcttctggagctggcacccaatttgatggtgtactacttttttctaccattaaattacgatattcgaatgcccctggttgtggattagtccaaattgtcggtctaactattgttgtgccttcacgaaccttgtacgtaaagcttaaataaccatgtcctccagctggaatgcttttaccgccccatgccgtattatcagttccgttaaccctgtcataaaagccgacttgaatagttccagaaccattacgaacctctgcgctaattgttaaggcatcaccaactgaccacttgctaggatccagaggccagttaggtccccaagaattatctacttttgtccaattattactagtaccgggtactaagtttcttccaccaatcttcaaattattcagccgatcggtaacgctattcatatcaacacgtaagccgttagcagtagcttcaacatcaacagtttttgcataaccatttaagtcgctagccgttaactttgcagctaaagcttgattggttagattaacgaaatttgtataagtcgaattgtcaaccttacctgcaagcaagccctgcatgtgttgagcgtcaatcttgagttggttaatatcgccattggcagtgccaagagtggtttgcaatcctttgacatcaatcttagtggtattaacatcgcctgctaaattagcataattgatgtttaaccctttaaccgtgttagacacatcagcaatatctttaccttgttgttgtgcttgtttagttaaatcagcaattgaattttgagcagagatgtatttctgcaaagcatcagcaacatcattagtcactttagttaagtcaggaacaatgttgttatcgtactggccttgcagattagttaccgaatcgtttagcttttgcaagctttcatcggcaatttttttattgtcctcaatcgatttgttgagattctcaacatcggcatcagctttttgcttgttattgataatatctgctttggcttggttaagcccttgttgagcgtccgcaacctttttctttatctcgtcatcagataaatctttacgaatccatttaccggacccatcatcctgcttttcaaatatccaaagttcggttgaattaccatttttcttaaaccacacgtcattaaacttagcattagttggtggcgcagttacacttggtggaaatacaactgtcccgtctggtaatcttctaagttgtaattccttgattgtttgagtaacgctaccttgccaagagaccatttgatcagaagaagttgtctgatcagcttttgaagttgcagaaagcccaccattaaaatcaagtgtgtaactactgtttgggacaacaaaagaattcccctgtttatcttctagtcgtagccaatcccccgcttcaacagcaggattaccaaaccaattcagactgaacgggtaaaaagttatgtctttcaattgctcccaaatatcattgagccgttgtggagtcatgatattattttcgagtttaatctgagaaccagtagcatctccagcttgataattcttggtttcttctgtactctcaccatcacgagttttagtagtaatagtgacttggcattgaataccattaatcttataggcagcttcattcttcgttagtcctgcttgttcatattgactaggatctaattcatagtttggttcagaaattgtccgaatagtaaacaatccttgtcgatcaaacagagcataaccaacatacaattgagcaatccaaccaagtgctttgcggtaactttgaccagtgatcggagctgacaaatctgcttggtgcggaagacgtgctaaatcatcagtattagccttaacacctgattgagcacagatctccgcaatgacatctaatactttagctgggtacgttagtttagatacataagttccctctaagccacagaaacgatcactagcactaacagtcgtaagattattatttcggtccatcttgatttcactggagataataaaaacgcccaacggttcataaacataaccgctagatgtttttattccaatgctaggatgaacctccattcccagcttcaatccctcaataaggtgagagaattcaatctgaactgtatttgaatacgtagacccaattgcaaacgtatcaccattgtaagctcctgaatcgtacttcaaactattaatatcagttgcaccatatgttttaccatcaatcgtaactttaatatccaaagttcgctgtgaagctcgccaagcatctcgagtttcttttgattgtgttaacactaattaatcacctccttattgctcaatcagatcaaaagataaacctttccaaactggtaaagatcctacaaatgaataaacgggcgctgtccgatcaccaacataaaacgtccccgatcgaacttgcccgtctactggatctaaatactcaacattaaagaattcagccttaacagaatctaaaatctttgcgcactctgctactgttaaagcaccaaaagttaatgttatttttcttttagttgcaactcgatcacgatgtaaaagtccttgcgcatcacgggtcgcctttgcatcaatatcttgaatagcaacctgcattgtttgtggggcaggattaaccactgtcccagaaatttttagagaatacaagcatccatctcctccttaaatatttaacatatttcgaccattcttttgatttaccgcgttaattcctttgatagcatgttcgccaaatgactcatcaccaatcttaacggttaagtgtaagtcaactggttgattactgttgttagtagtattttgcatttgtaatgcttgaacgatggcatttactaggtcggtactcatttctttgaatccgccgttttgcattgttgcatcattatttgatgaagattcagcatacatagaatttgaagtaattgcattatttgagagaactgttggaagttgtaaccctccgccaaaattccgattcataaatgcaatcgcttcgttaatccgttgcatacctaattcacgattcattagtgggataaccatttcaggcttatcaccttcaccaatttcatagaagccgtgcttagaaattaagccaccatcttcataaccgtgtccgtgaccaataactgccaacattgaagaaccgtaacgatgcttagcgtaattaatagcggcaagcatgttatcgtaacccttcatgatgttgtgatgaccagggaaagcataagcattaaatgttcctggctttgtttgtaaaagaccagttgcgtttccgtcagctaaaccatcgttaccaccaatagcacgttcgttaccgcctgattcagtttgaatttggcgaacccaagcatttacataatcagcactggcaggtaagccgttcttgcgcaatgctttcttaacagcactacgccaaccttccgcacctggtccggtttgatgagttgcaccaccgaattggtcaatcaccttccgtgcccagttcatcatgccttttttctcttcgttaactgcacctttggcgagttttagtggtacctcgcctgctccccaatcataggtcacaaacttatcgacaatatagttaacgagtttttcgggatgggcaatgtcatctgtaacgttttcgagttcatccattgcagcatcaaagaatccaccaataccgctaaaaaggccgccaaagtttaaactgctaagtgctcgactaattccactaaagtcaaaattaaagctaccaatcccaccagcatatttaggaaccatgtttgctaattcgttagcggtatcagttgcagttttgaccttagtaccagccggcagataagttaagaaattacgtttagcagggaatagtccttgctcaccattagggagttcataactttctcggtaaatatcaccatcttggtcattaactaatgctaatccacctggatgattttgtgtccctgttttgtaggcgttccagttaaagtaaccccaaccaacagaaccaccgccaagcttccctaatacccagttaattccttcgcggattttatcggttgctttttgaacaggtctaaccattgcatcaacaacacgactaatagcattcctaatgctttgcaaaccactagtaataccattaccaatagtgctacctagtcctccagcccaagaacctaacgtccttgaagtgccgtctctaaaacttgaaacccaacttcctaaacgctcaccagcatttttagcagcgttataggcaccactaataccattgcctacgtgaccgcctaaattaccagcccaattatgaatgctactattggcatcattaaagaaacttctggtccattcagataatttattaccagcattaacagaacctgagcgtgaagattcagagccgttattaatatggtcacctaagcgttcagcccattggcgtacaagaccactagcagattctctaaagtctgttgtccaagatttgagtttctcaccagcatttttggccattgattgaccattttcaacactgtcgttgatgttagagccaatttgtgatgaccaactatggaccttttccttggcattaccaatgaaatctgttgtccagtccttgatcttactaccagcctgcttggcaaatttcttacccttttccacatccgtattgatatttgaaccaatcttttgcgcccaggatttaatatttttcttggcatcagcaacgaatccagtagtccaagatttaagcttattgctaccagcaattgcaagcttcttactcttttctacatctttattaaagttggttccgataccagaagcccactttttcaaggtcttcttagtgccatcaataaatccggttgtccacttaccaagatttgaactagctttttgaacatctttcttacctttagtgatattcgtattgatgtctttaccaacagacttagcccatgatgtaaagttatctaagatttcatgggacttaaagccaatcgcttcaacccagtctttaggttttttacctttgccatacttagaccaaccatcgctaaacttagcagcaccagtaccgccccatttaccgataaatgagcctatttgttgtccaatcgcagcacctaatggtccgccaaagaataagccgataccaccaccaatggcaccaccaattcctgaaccgaagctcttgaacttaatttctttgttctttgctttgatacctttgtaaatatcaattccagaagttacagcaatcatagcggttgatagaccgatacctaatttttgcccgagcttcatcggttcgccagctttaatagaagacttagccgatttaagaaagtcagttttagcgaggttagtattttgccacttcttgttaacttcgttccataaatctttaagcttaccgacaccggtcttaaaattatcaaacttaattttagctagttcttgaattttagtaattgggtgtttactaaaatcaatcaccgttcccagtaagtcatcagcatacttagcaccattcttaagcttatcaaaactaagcattgtaactattttaagggtatcggtaaagtccttaatacttgaaatagttttacctgcaactttaagactgaacagtgtcattaaagtagtagtcattactttaactgctgtttggtgatgatcgatccaatcagataagaggtttaatgcacctgttagtaatttcaatgcaccaacaatggcaaaacctgtaatctttgctaacggtttaaggaaaccattaaagaaccattcaaaaattggttcagcagctttaatcacactgtgaacaaccttcaatgcagctgctaatagattgaagaagtctggaagtagtttagtaatagtaaatccggctagaggtaacaggacattcttgtaggcccatgccaaaccgtcccaaacatctttagtaactggacgaatagcttttagcaaagtgtcaattgattgcaacagcggtgtaaagtcaagcttcttagcccaattggcagtgtaagttgccatatcaccaagagcacctaacatatcatcaaccatacctaagagcgtcttaaagattgatgttccaacatcaccatgtttccaagccttgtcgaattggtccgctaaattgccaattgtattaccaatgcctgtaacaatttcaataagatggctccagattgaaacacctaattttgagtgattccatgcttcatcaatggatccaaccatatccttaaaaattctaagtatattattaagcgcattaagccaagcttgccatagtcttgtaccgttattgccgtgttgccatgcttcatcaaaggctttagcaatatcaccaatgaatttaactaggttagtagccaaatctaagagattagcaaaaatccttttaccaagatcaccagtattccatgcttcacggaatgattcagctatgtgatggatagcaacaagaatattattcagtgaatcaaagatagtctgaataaaccttgttcctcgtccaccttcttcccatgcttcggcaaatgccctcgcaatgtcgccaataatattcagcatatctgctagcagttgaagcaagttctccattactttttgcccggtaccgttgtcccagacatgtaagaatgaattccctacatcacctaataagcgtttaatttctttccatgaatacttagcggcgtcaacaactgcttgacctttttcatcccaggcttttttcattggatcaaagatttcacctaaaacctttttaaccttattagctgcatcaatcgcattttgagaagcctctaacgggacattccagtcaaggcctggatcgccttcatcacctgctccaccatcatcaataccaggatcatcaaagactggtgtatcttgcttttgctgtggagtaaacttctctagtggttgagcttcaaaggtgccattatcttggttattcttgttattatcaagaacattaagttcatcaaagcccatcaaagaagcttggaggtcttcgtttgccttcttagtatcttcaaaagctttcttcgcttgctcattagaagctttaatccgttcgttttcagcagcaacagcagcagcaccttgacgattagcttctgcaatctgctgattagctcgttgcacagccttagcttgttcttgctgttgtttcttaactgcatcgttggctttgcttgccgccttagaagtatcgttcatcgcccgtacttgactatataagccctgagcaccacttctagcaccagacaggctcattccagttaaagcagaagtaaactgagcaagccaaccagttgcttttttaagagcattcatcaacgagttaatagctggcaaaacaaagctataaattggataaaaagcagttaacaagttgaccttaattgcgttaaagctgcttgcaaactgcttattagtcattaatgctgaacccataccttgagctaacatcatgattccttgatacaacaatgtaaatacgattaactgactagctaacatactcattgccatctttacgccttttaatcgctcacttagcattgaagcacttgtaccagccttgcgcattgaagaactaccactatcacccatgcgcctaaatgacgaggtgacgtttgaaatagtatttcgtaaccgattaagccttgaacttatatttgatgcggtgttaccttcttgagctagtgtagtgttcactcttgaagatgcgtttcgtaattcatctccacgagaactaacgtaactataagccttagctaattcattgcttcgatttataagacgtttatactctgtttcggcttctttgagtcctttattattaccagatgatctaccaagaacagcatcttgtgctttggtttccgcaatagtacgcctaatccgttcaatctttgcttccgtttgatccatctcacgttcaatacgcttgagtgaatttggaatagtattaagctcttgcgacatttcttgtgcaagggctttggcttgattctgataacgttccatcttgacttgtgcattagcaatctggtcatcaagtcgcattgctctaacctgactgccttgtttgttcatatcaaggttatctctgctagccatcaatgttgctattctacgttgcattgattgcgcctgttgcattttctcgttgatgtgggatacaagcccatcaatttcctttttagctcgggaaacttccgcttgaatttcatcatcaattcctaaatcaaccggccttttaggcatatagctctgaattcttttttcttggtagtcatcgaagcttgagttttttattcttggtctaggcttttctttaggacgtacttcttgttgagcttgtttaacaggaatatcacctacagtttcacgagctaccttagtttgttgagcaattcgttgttgcatgttagatgcttcttgtaaacgagcagtcaaactatccaggcttttttctgattcgttaacggcttctttggaactttcggcttgagccttgtttccttcgataatcctattagttgcatcattctgcacactagccgtacgctcaatagatttttgcttagagttttcagcctcttcacgttgacgaacttcttctttggctttctcatttgctttagaagcgttatcgttcatattttgctgaatacgatccaagttactttgaattttagcttgcatatcgttagtcttttgaccgatgagactagtcaactcatccattttctggagtacatctccataattagcccgaaaccttaactcaagttcttccaagtccattactattcacctcctcctttatctttattaaattgtctaatccgttgagcttgttgcataagaatagcttgatctcttttccaatcgggttctttttcagacatttgctctatctggttcatatcatccttaacaaacggataagcttcttctaacttaggcatcttagcaggatcattaaccgcaaatgctaccaattcacttaaacggtgatccatatatgctttggcacgtaaatcatttaattctcgcttcctgttagcggcaatttgcgtcatgatttccgcaaagtctaaatcccagaaatgatcagcgtctattcctgattcaacagcgattgggtaaagatctttgaataaatctgatactgtatcgtaatttttttcgtttacagcaactgatcttgggtcgcttccactggatctaatgtcacttcgcccgattccgaattggtcttcgatgacttcttctttttgccgaaaaaaccagacgcttcaaatagttccattaaggcattaaagagatccatcgtggtattaccatcatctaagtacttttcaaaggcgttcaatactcgtttatcagttacgccatgattttgattagcgccttgtaatacgatcaggatttcattaactggaggtagcttatttccaccttgagagtccataaataaggacaacatagacttgccaagtcgccgttcaatcttaaatacctcacgaccgccaagctttaagtcaagttccaaatcacctaattgcattgtctttgttgctttcttaacagtagttgtcatatgaataaattctcctttaatttttatttgtcactaaagataaacgtgggaatcgaacccacgtttattaataaactagccttttggtgtatcactacctggtgcagcagtgaagtgtggaccatcagatacagtaatagtaattgtgtaacctaatgccccgttaactgcaaccgctgcaaacttgatgttgtatgaaccacgcattgtagcagtcattccatctgggtaagtaactttccattggtattgtttccgatcaccggcttgttttagggctttagcaaaactagcacctttatatacagcttggaactgaacgttagaagcattttgaatcccttcaacttgcttccgccggtcatcagccaaagtagtgacatcaaccttttcagtgtcaccacctaattcgggaatagtcttgatatctgcaatttcttcccacgttgatccatcttctgaacgttcaagcttggtaccagtaccaaccagaccttctgaactatcgatagcaaaacgttgtaggtctaactttaatgcgtcactatataattttacattcttcataatttcatcctttctggtatacacgtttacttgtgttatctacaattcctgtaaagacaagtacaacacgtgttattccattcaaatcttgatcaccaatgttattagaaaagcccattgccgaaaacttagcaatgagcttattttttatttgcgttaaagaacctttatcattgtacaaatcaattgttatcttccattctgtatcagtctcttcttggtaggcattacgtatataagaagactgagttgttgaatagatagcaattggaaatgccgtgaatttatcaggataagacggcgagacaatctttaattctggaatagacttcaacgtcttatataccagtgctttaacattgtagatttccatttaaccacctaatttatcacgaagctcttggtcaactgatttctttataatcccaggtgcttccttagctattctgttagcagaaggtgtcataaattgtcttgctggttggccgttggttcgataaaaatacttgtccttaatcttaacctttggaattccatagatttttgtaaggtcaatatcaacttcctcagctggaatgtaccagggagtttggcgataaacaattgccacattaggtggaagctgcttactagattgttcaccaaccttaccagtaccaaactcacggaaaatagcgatcattgacgaattccaccaacgaccaactatttcatccccatcgacttttacttcatgcttaaagctacgggcaagttcaccagtagaatatttgatactagattgcaactcttggactgcataggcttcggcttgttcaattgctgtctcttggccgttaacagttgcatctgctacaacttgaggaagttttcgtagcttagtttttaactcattgagccccacaatctcacattcaatcattttgctcatccctcttgatacgttctaaagtaacgtttttatgagtagaaaactcttgaatagccgtaatcttataatcaggatcactagaactcggaacttttaggcaaataccaaagccttcgccgtgcccttctgaaagtaaattgccttgatacttacatgtcttaatatatttaatatcttttccataaatttgcgcattgaccgtaccaccagctgattgaacattcatcctgattggttgtggatcaccccagccagaaatgctatagccttcatcatcttgagtattcattggttctttaagataaacggttgtaagatcactttcttttaatctcatagcttcgtcaccttagcaattcgatagcggtttaatccttgtcgaatatcttttggaataccagtctcgagataattagttactccaccttccgagcgttgtgtttcgccttcaagtcccagtcggttgtagttaatgactgccaactttttaacatacacactcatgttaccaactaattctttttgacccgtataatctagcacctgagcatttgcttcttctactagctccttaattaattcatcatccgtaacttttaaacgagcacttacggatggaaccatttcggccacttgatccacattcagcacctccaattaattaaaggactttagcttggtatacattatcagcactagcaaatgatggaagcatggttgccgctgctaatacccaagttccaattggatcttcaccagattcataaatcttagccataacattaccaacttctgatacttgcgcattagttgagatcaaacggttttcttctggagttgggccatagatcttttcacctggcacttcatcattaaagagaacgatccgatcttccgggaagtatgtttgtgttttaactttacccttagcgtcttcctcacgatacttaccagcatatgcacgaataaccggaagtccttgagcaaccatgaattgatctaaatcagcttgaccaacaacccgaccggtatctttaccaaagattgcttccttgatttcagtactacgcattaatgtccgtaataccttcttagaggtcaatgcacgtgttggggtaatgtcgagcttatcagaccaatcttgtaagttttcaatgattgaagcactaccgctatcccaagtagtattacttgctaatgcagtttgatgctcttttggaacttgataatcaatggaaatcccgttgtccttatcagtaatcttaccagtagcaaacatttccattgtcatcttttcgccacgtgctttcaccgcttgaaccattgcatcaatatcattaaatacatattgctttaagtagttagcttcggcattattacgtggataacgtaacttgattaacatttcttcggtaatttgcatcttgcgctttacatatgctaattcagcagtcatcttacttgcttcacgactaccgatttcggcttcggcatcaaaggctgaatagctagcaattgttggaacacgactaccagcttttaagatatcgacttcgagtgttggaaccttagttgctggaaataaagtatcacctaacatatctggatattgacgattacgagtataatcaagcaccgtattctgatcgaacatatcaagaattggtgtggcaaaacgttgtaaatctagcttaagtgtttgcttattcatctattatctcctcctcactacgcttttggatctgctgtggtagtatctaaatccttaaagtgaattgctgtcattgctttaattgcatctgctgatggagttggagttaatcgttgacttaatacccaaccttcacgcataacagctaccatttgattagaaccatcttctgatacatatacatcattaacagtaataccaaccgcctttgcatcattcgttggatatactgtcccagcaggtacatacttgcgtcctaagtcatcagtttggacattgtaattgtccttgttaattgtttcagggaaagcagtgaacttctcagaagcaaggaagtttaattgcttaccgttttgaaatcgtgtgtacattaattttcattctcctttcttatttccaaaaatcactttcagatttattagcactattagccttttcggcataaagctcaccggccgatttatgagtcaaatcatcatccgtactcttaggtgttcgtgagccttgtgctaatcgagtttcaacggcatcatgaacggcgctacgaaatacttcgcttacccgttcatacgtttcattcatattgtcttcgttagctagaacatcatcaaaaacatcaactaacccagttggcaaaccatcatcaactaaacgagaagcaagcttacttcgattctcacgcttagtaacatcagcttcacgagcagataaagcttcttcccgttgcttgaagtcatcctcacgtcgttcttcttcggtcatgttcttgcgatccttagctttctttgccttatcgctttgttccttttcccagttagccttagcagtccctaatgccttgtctaacttcttatcaaaataagaatccaattctgactgggtctggaacgtcatgaaaggcttattttgcgtatcagaatcatcattagtatccgttgcttcgtttcctgtatcagcacctccttctccatcttgtccttcatctgcaaaccgctgtaagttcagctttagcaaattgctataaaactttactttttccatagatataatcctttctacccatgcacactcgaatttatgactgcacgaaaaaagccactccatatttctacacagtgacttctaaaagtgtgtcttcaagcccacacacgtattcaattattgaagtagtttcatgacgtgcttaggtcaagatttattgttacctagatagattacaggcacagttcgacaaaacggatgcaaaggtggcacattcttaccaataactgcatcagatacgttaaaaactttattattaattgctcgacatatcttactggttcgactatcaagaacagcaattaactgatattgcttaactccccgtttcttccagctatcaagctttaccttagagtaaaaataattagcttcggttctgattaatcgactagcattgaaacgacttgtattaaactcatcttcaatttgcttaatcatttctcgttcagacattccacttaactctttagctgtaaacaattcttgcaagcgttcagcaagcttatcagtgttatcccaaatacgtgatgaaaagtttttaccttcccatctggaatttaatgctgcctccacataacgattaggtagctcagtgattttcgacttcggtacgtcttgttccatcgataccgttgcaatctgcttgtcagtcttagggttcttgataacgattttattttctttagattctaaggctggttttgttttattagagagcttgtaatcttttgctttatcatatacggctccttgcttttcgacttcggaccaggttcttttcattacatcagtatgcaatttaatattctgatccaattcaacgtctccaacatttttagcaactatatacgctttgacttgtaactcttccagtcgggtaattctgctcttagcggctaattgatttaagtaattatcaacagccttcttactttctttatcgacaatattgcttgctaacgcttgtaaggttacaagctcagatggtgagatgtgcgaagacatgatcgttgcaacttcattagcagtaatatcagcataaaaatagcgacgataaatcttttggacctcgtcgcttaaatatgcttgcgctttctggtatgccgtattaataacttttaggcgtttggttgcttcatcctggttctcttgttcatcttgcaagtctcgcaattgccaatagttgaaattgtttttatcaactttcataggctttcacctacaaaacagtgatgtattgaccatattgcttcacaagctgattaactgtattctcaaacgcgtttagcaaagttttatcttcaatgcgttcactatttgtaaatacagccgtcagagttccattctcatcatttacagccacgttagtacaattattaaccgtatgagttagcaaggtagaaaacgaagcacagacgatatcagagccttttacactatactcagcgtgtccgcttgctatgattgtcgtcttgttctgttccttttggatcttcactcgaatcatcttgactatcctccaattctaaacggtctggatcttgtcgctgtaacgcttgctggttctttttgatgttatcagcatcttgttgagccatttcatcaataacttcttgaacatccccaacttgtggaagccaactataagtaatcttgcgcggaagaataccgtcagcattcttaatgttgttaactacatcagacaggttaaccggaatgtttggtgttaacgatatatcacaaccatcaacatccgaattgccacctttaatattaacgatggtttggatcagttttaatcgccggtgcaagccatcgaagaagtaacgcttcttaattgaaataagattttcaagcccaaacagcttaaatttcattgcttcacctgacacatttcccataaacttttcatcgttcatatttggaacgtatgagatcttatgaatatcattttcgatcgattggctgagtagattaacctgtgtttcgtcgaaagttttagttagccattcaacatcagctccatcgtcacgagaaggcgcattaataacaccattctttaatgcttcaatagcatccgtatcctcttctaacacgaagccaaacgtaacaaggattgcatcgacaaaggcttctttatcagaaattcgatcagtttgcaggagattataagcatcaatcaacgagattagttgttcaaagtcaccctgtcgctcttcattatttcgatactcaattaatggaactgcattgaataagttatcgtattcgtcaacgatttgatcatctatcgatacttccattcctacttcagtgcgatattctacaatcttttttggcatgtataccgtgacactataaccatcagtctgtccacttaaattcttctttgcttgaacaaacacgccaaataaaggttcatgttcaaccgtatcatcagtaacaacaattgcggcacgtggatcaacggcttctactcgtaattcagtgttaggagtaatcttttcattgccaagctcatcaatgctaatagttggagcaattgttttaagataaagcaactcatagccatacccaaacacagataagtctttttcaagctcaatatcgtgcttatgaatatcaatcttttctagtgcttctaacacatcatcaatattcttacctttcttggcggtatatttaaccggattcccagtcataaaaccaacattcatatcagtgatgtacttagcatgattaatcataacgttagaagctttaactttagcattctcaaagcgatggttattaacttcttgatttccgttgtaataatcagcaagtttatctagcctgctttgtcgttctttcagtttacggatagcataattaatcgcttcaagatttggcttattaacatcctcaagtaattctctatcaattgcaacagccacataaacaccttctttctataaaccacgaacacgtggacgtttggtaatctttgcagtgaatcctttatggataaccatgtaaacgaaataacgcatagcatcgcaagcgtgatcatgttctttcactggtttatcttcaccacgttcggctgctttttcatcccatacatagctggataattctttaaataaattaggacattgattgctaaatagtatcttgccttcattcattgccgtttgggtaacacgaataccatctaccacatcattttttgccttttgcactcggaaaccattattccgtaacacagcaataaaagaagccgcagacgggtcaatgataatctttgcgtgaatgttcccaagaaacttcttaagctcctgacaatactgctcatctgtcttttggtgagcagtcgcacgtcctgaataataatattctttaactaagtaccaaacaccatgattgcgtccccacaacagaaatactgttgggttctgcgtaccgtaatcacaagacacataatacttttcaaaatgattaggcaattcattaactaccatcgtatctcgatcgaagttgtcatagatgaccccttctgacattacccacaagcctaaaatatagcgttgataaaacacgccagaatacattcggttataacgatcaatggtttcttgtgccaatgatggattgtcctgcatcataaaatgaagtcgtaacgctcgcttatctttcatttggtcaatccattcaagtttgaaccagtggtaaggtccttcggggttacagttaaaccacatcttagaacccgttaccgaacaacgagccgttgcctgattaacaaaactttgcggcataagtgcaacttcatcaaaaaagaaccccgccaaagtaataccttgaactaggtcctgtgatgcttcatctttaccgccaaaaatgaagtaataatttgtatgaccattcttgctgatcgttagcatattatccgaacgtgaatcgtgaatggcatacccttcactttctagcatgcttcttaatggtcttagcacgttacgcctaaatgaaccaattgttttaccagccattccaaactgctgaccattgaattgggtcatggaccatagcacgtatgataatgacatgacaactgtcttaccagcacgaacagaaccatcacagataatagcttcataaccctttaattcatcattagcccaccagctaagcgcttgaagttgtttccgactaaacggggtaaacttgaatctaactgtctttatccccatctttatcactccatatcttcttcataccattgctaagggcagcaagtaatgagttggtgctttcatcattaacttctggttctggcaagcgatcaagtaagatctgcattgccttctgacgatcttccatttcaacaactggctcacctttatcaattcgaatactcttgatgttcgatgtatcaatcttgctactatcttttaactcaacaatattcgtatagtaataagcctgttcgcctgtttcaggatcaatcttcggcacatagcggaaattacctccgccgtcttcataaggtccatttttatcgcgtaccttataataagccaaatgcttttctgttctgaacgatagaacgtcagtaacattgctagtcgcttgatttaagtaacgtagcaagatgtcattggcggtcgcatatagttcttgcgattgctgtttctttaactcagtaaggtaagattttatccgagcatttccgagcaatctaggaccgttagtcgttgctacattgtaacttccaccataagctttttgataagcccaagtagcgttgtatcgttgcaagtaatacagacaaaaggctttttgcttatcattaagttcatcactatctggcaattctggaggcggtaacgacggtgcaaccttttcttgttttgtacgcgtactttttacttttgtatgcatacttttcttcttggttgcattgtttcgttgccatttattcctggtcttccatgacttaactgtactaagtgcaacgccatacttcttggcaatgtccttatatttcatcccagctaagtaatccgccttagcttcttccatcttactcatggcatatcaccacaccacctttctaaatttgtgtacaaaaaaagcacctgcaaattgcagatgctaataatgagggcgcccggagttgcaccaggatcttgccacattggcacgttttcctttataaactacttccctcgtctataaaactttatttaagtaatctcgtagctttattgcattttctttagataatttgaataccgtctgttgatcatcttgttcccgtgttccttgacgcatattagggtaataaagattagttaataaaacatcaatactatctggttgctttaagaagctgatctcagcctccattcccagatgatcgtcaatcttatctttatacattgcattaaaccaaccatcatcaatgatcaacgaatgatcttttacattcttaaatgattttctatgcattctttacctctcataattgattcagctactcttatcacctaactcacagagaagctagttgatagatatataccacatggcgccatcgcgctaatcgttattctgtttccgtggatccttagtaccagtgattgcttccattccctcggtagtaactatccattgctttccaaactttcttatagaaccatttggaaatttatctgggttctgctgataagttctccttacatagttttcagcatggccccagattatggacgcttctttagcatccataatatctggagtgttcaagtttatcctagccatacgcgtacagccccatagacaacccatgccactacaccagtaatcaaagcaagtttaatacttttacgatactttttttcttgtttactcatgataaaatagaatatagcaaagcgggcgaggctctcacctcaaccctttgttatcgtttatttaaggaaatgcttaacgactattttaattgtttctgcaatcggataagcaggcactgcccatgcagctattgccgcccactttgtagcttcaactttgtcgttctgcttttcctttttctttttatgttttgccatattcctatcctcctttcacttattataatagtactatatcgtacgtaagtcaagtgaattagagggaaaactcatttatttttatgtactttaaaagccggcaagcgttgacctgtcggctttttctttgctaatcgtttcctagtgcgttcagcatgagctaacatatgcaattcagcaccgctgttggtaaagccccaattcttagttgttctcatatgttaattcctttaaccattcaatagcgtcttgggatagtttcagatgatgaccgtattcaccatcatctgaaaacgtaacgagtttgccagtcatcatatgttttaaatcgccagcattcagttcagtgggttctccaccaccccaaagattatattcttctggcacatcttcccagcgcttgcaatttagcctagttacctctgtcacttccaactcctcctatcaatctatcaaaacaaaaaagcacccattgctgagtgcttgtatcaaggctatggaagaaacacgagtaagtaggtgcttcctcctttcgttgattgttgttaaaagtagatgagccttgaatgctgatggacggaatcgaaccgccttctccacgttgaaacggaaacaactgtggtgctttaccattaagctacgtcagcataatacagaaatgcttgcatccactaatcgtttttgaattttgttactcattgcatctctgcattaaatcacggcttagacaaaaaagactatgcaattacgaaagaggagcgttcatctcctatcatagttaaatttgccgtgataaagccgagaggtggattcaaaccacacttttgccacacgatcaagtgtgcccatcttggttctcagcaagcagtgcgacccgttaacactgcaattacgaatatcgggaactgcccccgcaagtattgggccactccaggatacttggcatctagtttgcatattcgcataatcaggaccacgtaatcaccgcacccggtcgtagttttccgcctactcctgtaacggtattgctgtccattcatacggtaatcctttagccgctgagttagattacatactcttctgctgattacagcacggttgctacgagactatcagagtagcatgtaaatttaatgataaaggagatcttccaatcttccaaaacgcacaaaccaaatttaatcgttaccgtaaatttcttttgaagttaatgatagtctcaatgtggattatggtcatctgccaccatcgcgtcggcttgtttaccggattccacacttcctacgcttaacaagagagatcccgttgcgagtatcgttaaacgttggaaacacgcatagcagtttcaggattgcttaggcacatatttaaacggagcgtgcaaagttttattagctaactttgcgacgataacataatataacgttatatctcccgttgtattcccgtttttgtcctcttttcatcccatttttgtcccgttttcttcctgttttttgctcgcaagtcaggaataatatcagaatcaacattaagccgttcacataccgcttctaaacaatccgcaaattctaagcaagcataatcatcagctcgatagtaagtagaattgccgaatttgttaattcgctctttaattactgaaagagataaaccttgaatatatctatacttgataatttgttggctagggtgtcggtaactactgctgcatcctgcaatcgcatagtcaaccgctcgttttgccaacgtgtattcagcatattcgatcatgcttttttctgaaccattgccacgtcttgatcctcgaatacctgtaatatcattctgtggcgatttaataccccaatcacccgatctacgtctaatagttgggtacttatcttcgtctaaaaagaaattctgtacgttcgcaattgttgctttcttattatccccttttaatagttccactatttgcacgctccccttgtgatataatagttatgctttaaatttatatctatggaggcgttctcatagtgagggcgtcttttttttacgctttttaacgcaatttaacgctttttaatgctatccaaagaaagaaaagacagcataccaaatactgaataccatgtatagcactccgcctagacctaacaatgcaatgccagcaactataagcccgataaatccaattactgtatatcccgcaaaattacgtattactcttcccatcttttccctccaaattcacttctattctttaatcttgttatttgcgtctttcaaaatgtcagatattttttcttgccttaaaactgcttctacatctgtaattctcaattgtccgtaatagcctgtattacgaaataacactcctacgtgacgataatattcaggttttgataaccctgtaatctttagaatagtagactgtttagtgccaatttttcgcaagatataagcttgtgcaaaagggttattaatattgtgcttataaaaatattgcttaattcgccattcggcttctttaattcttctaggttctcgcaacttcaaacccttacgaaacttcataatttcttgaagtcgccaatcatcaggagcaaggatctcttctggcatttcattaactccaccccattcatgattaacagttaatgaatccattgctttagatagtcttttaggtattgccatcttcatttacctcctctacctcgatttctaccctaggatggtcactgtaatacttttcagcaactatctttacaatctggttgtcatcttcccatagcaggccgtttaagccatccaaagtagatttgatgtaattatccgtgtccggttttacaatcggtctgtgtattcctgcgatccgcaattcgcgttcttttttcgatatgcttgattgaatgtgtcggtaaaatttaagactaacaattagcgggcctgttaaaggctcttttttgtattgaaattggcacatcatcgccaattgttttttgtataccgacactttctttggatcatacaagcgtattcccttacccattcgagttgctctaggccgtgcttgttctacaggttcaatttcaaaggtaagtttcactaatctaccctctcgtaagttcgttcaaatatatcttgatcgatagcccaatgctctccatctatgccagtagcgacgtaatcacctttgtgaactcgcatcggtccttctttagtatctaagtaaccagtcccaccgtcttcaggaaaccaaggctctccgcaatcaagcctcataggatcccagctcagtgctagttggtaatgttctgcttcggcacgagttaatacctgttcagcctcaattaaggctgtctttctgtatttgtgtagcattattcttcctccatcctgtgagtttcccagtcataactaaccattgtttcaactttgaattttttatcacatccaatgcaagagatttcatgctcaccatcttcatacaattcgggatattcaattaaatcatcatcactaattgcagcaccacaataaggacaaactacataatcactgctaaaagtatccggttccccttcttcaatgctttctctaattttcgctaagttgcgaagttttaagcaatcattgcaatatccgccatttacccaggctaatttgtcatactttccacacatcttgcagtgatgatcttgataatctagcgtcattattcttcctcctcatgttcactctcacgattaaatttagccaattctaattctgtaatgaatggtttcccgttatattgggcttccacagaacgcttaaaaaattcaacagctttgtgttctggatataagaatttaagcttatccatgattgccatcgctctaagtttttgctctaagctccccgctttgttaaacgacttcgacagtagatcagcaaaccgtagtaaatcatggagttgtttattgctaatccagtaaggttgatccgcttgtttacggccgaattgctcagtaagaattgtttctagctttttcagataagcatcattttctaagctttcataaagatattcacctaatgctttcttttcttcgttcatcatttcttccacctcttaggctttctagctttgctgtgccaccattgtgaccattcgtagctggtgtgatcgtgccaagccatcatgtgcttggccttagcaatctgtcgcttacgagtgcgtttgattggtttaattctcttgcacttatggaaagctgcatgaagatctttacggagtttgggtgtcattatcataactgctttaatcttcattagatactcaccatcccttcaaataatacataagcctgtcacgttcataatcagttgctattattcttccgttttcaatctgtgaaatttctacagtactaattcctgatacaactgataaatgtttagcagtccatccttttttcaggcgagttgatctcaacaagtcaccaacatttgtatggactctaggtttttttctcctaattgtattgtcgcaaacccgacaatgcatatttttctcaaaacgcgccaatctccctatccaaaactcatgaccacaatccaaacttttaatcttaagtggtttatttgcattttgatatgcggaaacaattatgaagtttggggaaagcttatttttagcgattttaaatccacgttctcgaagggagtttatattccgtttacgagcacaataggggcaaccatctcctctataaatgctgtaaggtcgttgcatatatatattgccgcaagcaagatgtttaacctgtgtttttaccgaagaccctttatactcaccaacctcgtattcaggaccaagtatttttaatgcacgtctttcaaattcttcttgagttatatgttttcctctgtaaagatcgctatattgcaaaaccatcaacccattcggaaatgttataaatttcttgtagttcagcagtgtggggcattttgataacttcactaaatgctaaaaagtcacttgtatcattacgaataaaataaacatcctttgccttcctgcttaaagaatcacactggattgctactccattcatccccctaattgccatattgaataacaagaaaggaattgctctatctgacatttcttctacttgataccaataagctctagggtcataagtaaagattgacaagaattttaagttaggatcagcgtgtaatggattaccaacccgatcatttatacagtcatcccaccagcgcttgattaaaattccacctgtccctgcagctacctcgaaatagtggccgttagatttatcgctatcaactaagctattaagcaaggtcgcaatgctatcaggggtaaaatcctgcttcttgcttttccgttcagcttgctcatcttcaaaatattcatggaaccagtcaaactttaggtccgttgaaacttctaggaacttcttaaagacttctggacgtttttgatcattaagcattagctgcagcattctttccggagctttatatgactcatcaactcctaacagtttattaactgtcttagtatcaaattgcattatttcacctcaaattccggccatcacagtcataatcttgttgtcatcctcttgggctagttcatcaagaagatggatatatactcgttgcgttgtttcagtatcaccatgtccaaggcgcttagctactgattgaatagacacacgattagcaattaatatcgatgcatgagtatgacgcaagccatgaactgtaacccgatgaacccctgcttcccaacacattctttctaacttagtattaaacgtactattaaaaattcgaggttcaccgtaaacaggagatggcttgctaatcgacgcataccaagtcggccatattggttcatccggttctagcccttccatatgtttttgtagatccatcaaagtcttgtaatcaattttgatcatcctaaccgaatacttatttttcgttggcataaattttccatactcatcactgccatattttttggacttgtagttgaaagtcttattgatataaatagtcatattatccatatcaacatctttaggtgtaatgccaagtgcttctgcaaaacgggtaccagttcgtaagctaaagtcaaagaagtcaccccaaccaatctgatcctttttgaagaccttttctagtttccttacttcgtccatttctaagtatttaggacctttattatcgggttgaaccatcgaagttattttaattttatgatttggatttttacccgtgatccatccttcgtaaacggcatcgtcaatcgccgcagcaatatggtggtaaaagtcaagaaccgttgctttttgatgagtctgaccataaacattaattaacatctgtagatcttcacgcgtcatatcacccaaaattaggtctggtgctaactttttcaaccacttcaaaactagcttatatttagctgtcgttactcctctaactgaattaactttgtaggtcatataccattgctcgtaatatttccaaaatttaattaagcgtttcttaccagtctttgccatagtttccctccgccttataaaaatcgaggatagcttgattaatttcaggcaccttcattgcatcaatcgatggtgcaagagatggttcacgttttttaatttgatttaattctttctcactaaaaattcttgcttctttttcatcttcagataaatcaaaaacaagttcatcaaatccagtgatgatatttgatacatactttggatgaaaagatgtctctcgtttagctactaatcgatacttcttttctggaaaacgttcattaactggtgtatcaagcagccgctggataacgtccatggcacgtgctaggtcttctggtgcaacttcagttaagccaccccaatgttttaaaaccgtatcccagttaatcgccttagtattcaattttaagaaccaattatcgcttatcatgtcttttgaaaaaacgttcaaatagtcgccatccacttttgctctaactgtcatagttgaattaataacgtttactgcttcatcaattttcattgtgctacctcctcaatttccttgctctcacgatctttaacaggcgttgcgatgtactgatcaatcaaatcagcaatcttatcccgcagctcatcgtttagatcaaaaatcacctttgacgcttcttcggtagtaatatcccaaaactcaggatcaagccattcttcgggccagccctcaaagttatcgccaaacggttgagcgatactctttgcctttggatcaattgtcataaaccaccggcaatctttgtcatcgtctcggtattcttcccgatccgcgtaaatgtcgataccataaatatcgctacggatagcgaacactttaggcaactgattaatccgctcaattaggtcatcggttgttaaatactcttctgcattcatgctgtctttgcctcctcgtaattccaattggtgcaggctttgtcacgtagcaaacggcactcgtgacaccaattagctgcatctttaacgttttgctttgtaatcggtgcttttaaggcctgtttcatttgatttcctgtaagcggcatggtgtagttgctatcatgttcgtctaactgtgacagataataaatcgctatctgtagcttggttttaacgaatttgattgcccgtgcctcaacattatggctatcccattcatcttgggttatctgcaccatacgcttagcaacagcccacttagcccgtacttcatccttagtcatgtgttactgcacctcgctctcatctggtagttgatccatccaattaccttgatcagacttgccctgtttctcctgctcttgttcacgtttaaaccactcaggcataggttcgttaattggcgcacgtttgccatacctttgtctttgattattagccgtgctagggttggcatttaagtacccatcaatctttgatgagcgaaagagcgtttctggtttcaagtaattgtcacctaattcgccgtttctaaacgttaccccgtgccacaatgagtacatgttatcgattacctttttcatctcatcgactgtgtagtcttctttgagtcgaggttcaataattcgcttattaccatcagcatcaggcttgaagtgcttgccagttttttgattgagatattcaacaacttctcgccgctgtgcagcaatggaaggttgggctggctgtgcctgccctttatctcttgtagtagtcttttgtgtagtctcttggtagtctattggtattggttgggtagattcttcctctccgattgggcagtttttaccgtctccattgggtagattcttcccattcgttgggtagtttctacccaatcgttgttccaaatgggaaaatgcgtcatagtcaattcgataccactttgttttgtcaaaagataatttattatagttgcctgtaataattagtcctcgtttttctaatttcttaaagtggttcgatagagcctttctagaaagccaagggaactgtttattccaatcagccatgctgttatagacccatttgtgattgtctcttactgtattagaacgttgaagccaatagtgaagctgctggagaataacagcttcgtctaagcttttcaacgctccagctaacgatgcctgaacttgtaacggtctttcatcaagtaatagtttgctcatagttaccgttaactcctatcttttttaagtcttttttgcttaatttaattcctacggttgtaaggtgatacttcttacagaactctgtaatacctatcttgtggaattctgtatggtgaactctgcataacgccattgcacggtgtttagtgtgatctgtcttattgcggttgttacccataccaacggtatctatatggtgaaaatctgcatgctgtccacaaatcaaacactgtttatgcattaagcattcatactgaaaatgttcttcatttcttggcaagagttcatatcctttcttaactggtacttgattgtcaaaaataaaatcaattacataatcaattaatcgtttagcgtcactcatgctattagatgagccatcttttaagctgatttcttcaccgtcattcttgatccagtaaagattgtggaaatattcatcaattatttctttgctctctccagaccagttaataatgtcacctagcaacgcatagtaaaaatggcgttgtaactcgcttatttcacgtttatcaacaaaagtgaccattgcaggtacgccttgaactttaccgtcattgatattggctacatgttcccagttgacttcttccaagtattcggaaattccgaaacgcttaccgttcttttcttgaacataaacctttgctggaatcttcattgatggcatttatatcagtccttagaagggcaattggtcattatcaatatcaattggagcgccgttaccgtcattaaatggctgtttattatttgcttggctagcagtgccaaagccgttgttagtttgattactgttattttgagggcgtttttgtccgtttggctggcttccgtccgcttgtaacatacggtaacgtgttactactaaataggtattaccgttgtaatcactcttttgccattcagtttcaacggctaacttttgattagccattttttgcacaaaatcaggaattgagtaaataggttcgttatcttggtatccagctgcaattaatggagtattaaatcgcttaactgataaatcatgattttcttgtgtattattagtccaaacaagtcgatcaaagatatgtttgcccttttgtgttccatctaaaacaatgtaatccattgaagccattgggttaccattctttgagttgccggcttttgattgtgcagaaacataaatgttatagattcccgcttcatcaggtacctgtgagccgaatgtgttgttgtggttagtgacaaataatggttgttggttattcataattaagcagctccttcttcttttgcttgttcttcttgtttagattcaattaattcttctgcatgaaatttcttacgatcatcaattctgttctttccgtgattaccgctttctgggtcgcaatcaatccaacgttggttgtcttggacgtatagccgtccgacaaaatcaaacacgctagtaaacgcgttaaacgtcttttcattcatatcagccccgtaacgtcctgctcctgttaatccaccagtaccgttatcaatttggtgtgcagtagcgtagatagttacattgctctctcgtagcatagtggctaattgtctgaaccaaatttgtaacttctgataattttgtcgattatcttttgaagcattgtcgatgttttctaacaccaagttttgtaatgaagtgacgttgtctaatgcgattgcttgatattcgccactcttaatggctcgttgtaagaagcccaccgttaactgctgaatgttagcgaagtcgtcttcttcaacgaccataaagtcagtatctttttgattacgcagtggattggttgacttatcaaaactgaaaagaagtttttttcctttgaattgtttgaataagcttgtcttgcctgttccgccatcgccatagataaaatacatattaggaacttctggaattgctccggctttatagaacttcataacttaccacctaccgatccaatcgaatgacacattgcttcttgccaccctttacaccagataatccctcaataatttctcccgtttcattaagtatgacttttccatcatctgtaatcgtggtagctcccttgatctttgctttgtcaagttcagtgactgttttgagtaaatcactaggtaactgcttcattgccttcctttgtgcaacagcacctccccacttccaactatcactggtcgttcttgcttgaacgttacccattgatgtagatacagacgtttgaccatgctcggtgtcaataaatccaagcaattctgtcatcaagattgcattatcgtcttccgccctttttattttgctttcgtaaaagtttttaacttcatcaatttctgccttttcagaagcctttgcttcttcaattaatttcttgtttttcttgtactgccgtaaacgctgattaattgcaacagctttatcagcttcaaattccacttgattattcatggattagcttcttcctttctgctaaatggtatgcttcggtttcaacttcttttgcgtcttgcttaaaatcgctctgattatctagatcgtctaacagatacatcattgctcgtgctatgtcataatcataagcaccatcgcttaaaatcagattcacgttatagaggttacgtgctaaaactttttgcattcttttaagtcgttgtttataaaattcgttcatatgctataatctccttagatataatttttcatatgctatctatttgccatcggtgttcccagcaccggtggctttttttgtgttcaaatcccatagcattagcagatagaagaacagtaagaacactgctccgccatagtcaccaacgcctgcgcaataggtgatccaagcacccattagcattgctaagagctttgaattaactatttttgttagtgtcatttgattacctcctctcgttgttgcttaatgaactcaaatattttccttgctgtcggcacctgatcagctgtaatctggcgaacatctttaaggccgagcacgtatttaattggacggtaaatagcatcttgaattgtcatatagccaatgccgtctttcttaactcgtaccttaatgaattcttggatttccttactaagtttccgccaatccgggctaatcttaggttcattatccttcttgcttaattcataaaccttcaatgcaattgcgttcatttcttcttctgtcattgccattagttcttgttctcctctgctgttaacttctgatatttacgatcaaattctcgactatatttaatacaagcgttagtcacaacagtattaacacttgatccgttgtattccgctattttgttaagcttattggctacccattcgggaagtcgtactgatcgtctaactctctccatgttatccctcccgacatattttatgtgtctataatagggtgacacttttaatgtgtcaatacttttttaagcctaattggtataattttggtgtcaggaggtggtaccgtgagttccacaacaattaccattcgtctccctttagagttatcagataagctcgattacgtatctgaaaatattggaatgactaaatcaaatttaataagagttgcaattttaaaatatctagatgtaaaacagcttgatgaatttgaagaaataaaagcatcgtcagaaagtaataagcgaatcaatttatcattaactgagttactttattcaatagttaagaagcgatctgataacttaggcgtaactgtaaacagccttatcatttatgcttcggaaaaaattcaaaaacattattcatacatgcttgaatcattagaccagtaacgctaataccggttaatttactgattcttaataagtcatcatcgacttgttttggcaaacgtactgttatatatttcatatttcctccatactctcctttgaagggaggtgagtttatgactgataaagaaattgctttggaattgaccaagatctacgttgaacacttaaataaacaaatggacaataagcatcaacatactgatcttgacttcaaagcctttgggaacgtatattcaaacctttatcaactagttcatttaattgataattctgatgaaggtaagtaattgatattaatatttacttcattagccgaaagagttgctacttcatctagcagctcttttatttcattcaagttagtgcaagtggttgaaatatctagtgttagttgttccatttttgtttacctcctctgaaaacatctaagctaacgtctaatgcgtcagcaatcttacacatgtttttgaacggtggttccttcccatcgtttttgtagttataaattgttgttagtggtatgcctgtcattttagataggcgataaactgttatcttctgtttgtctaactgaatttgtatgctattccacaacatcttgtataaatcaactctttctatatccatatgtagtgttataatcaaaattacgattatttacataacactccttttagtaaattaatcgtcaattcaatcaaagtgaggtgtaattaatgttctttagtcttcgcaaatcatctgatggacaatattatttcgttatcaaatcagataatcaggaagtagttgctactagcgagacctacattctcaaagaatcagctaaacataccatcaacgcaattaagaatggtattaattccgatactccagtatttgatattactgattgctaattattcgtttgatcttattggctagagttagattttttgcagcttgttcttcaagctggcaagtaatcttctctagctcttttttattttcttcatccataaatcgttacctcctaatgtttctttctgtacttttctttcagcacattcagtttctcaccctcaataacgttgacgattgctccgattaagaagcaagccataatcgccaacacacaccatgctagatacgccatttaatcacctctcaacgcttttacatatgggctttcatgatcttcgtagtatctttctgatcgaaatgtttcaaacttttgatattccttcaaatcaacgcgaccaccggcaagaaatacctttcgccagtctggatagttttcttgcgcccaaactttgcgtctatcaaaagtcgactttgacataggtacttctatttccttgtcgcctatctttttaattgacttccaaacattacagaattctagcctgttcatctggtataaatatgggctcatctaatcacctcctctcttttgctatacttagttcatcccctacgaaaggaggtaactactatcactactcattacagttatgaggaagctcttgaagacgttgcacgcattacgaattacatccctccagaagcacgtaaagcaatgcagctagcttcgcaagctaaccaacaaattacagaagcacttgcccctattcagggacagctttcccaacttcaagaactgctcgcttttacttcgaactttgatattaaaattgcctcgactctcaatagaatcaacaatgaaattattcactacccagttgaatcatttgttaaacttgcggataccgtcgatgatcttcccgaatctaacttcgatcattccaatcacgaaagcaggaagtttacccgaaatagttattccggttgcaatgatactgaagcagacagcacacgatataacgtcaagctttttataaaaaaacaaatcgatcagttcaaaaagaataattccatagaagagataaaagtcccagatgtcgattactgcttcaaatttttcaagcttctttttcatacaataaataccctctgtatcatttacggtgtctataacgacacttttacttatgtgctcatagaagcgatcataacgaatatcgacgacatccttgatttcagggataagtaatcgtctgtcactagatgtctaccgtcttctgcaaaagaccgtagacattctttttttgtcttgggtatctccttacatatccagcacacggtagatcttcttacgaatctcgatcgctttcggtgagttatcacccttaattgctcgattaacttgttgacgattaatgtttagcaaacgtgataactcagcttgtgtcatatcacgatcaagaagtttcattttgatgtttcgctccacgtcagctgttgctttttcaagctcattttctactggcatatcctattcctcctctcttgaaatgtttatcaacttgttgcttgtttctatcactcgtgataaaatcagcttaaaacaaaaaccgttattttacggcatttatggcttttgtttatgttacttaacttgttgacaatcttattatcaatcattcgtgataaattgtcaactgttttttaatcattcgtgataaaaatagtcaaaagaaggtttgattgatatgaaaactgtagacagaattaagaaattatcgaaaaagagaggatggtcactgcaaaaagtagcagaagaagccggtataggaatcaatagtatatatcgttggaactcaaaaactcccagtacacaatctttaaataaagttgctaaggtcctaggagtatctgcagactacttgcttggtgaaactgagaaaaagaaaacagccgatctcgcagataaagatactgtctttacgttcgaagggagggaaattccgcctgaggatttagaatatatgaagcgtttattgcgtggtgatgataaatgatatatcaacaagcagaagaagcatacgattatcttttagaaaaagctgcagaatatcatattgatgttaaatggaaacacttttctccttatactccacctgggagtagttacgaatatcgacgtgtagtaatgaaccttaattggcatcggccgaaagaaattatttttcagtttgcacatgaattagctcacgttattcatggcgatcatggagacgttgtatattatcacgcgtcttttactggtaaagagtcagttgaatataaggcaaatgttggtgctgttgaattactagtccctttttactgtcaagaagtagatagagaatgcgctaatagcgcaaactttatggaagtattcgatgttcccaattatttaacagacgtggttaataagcaaattcatgattactatgtagtttaatgccacgtccaaaaactgatcgacgttaaaagctgaattttatttatattaggaggaatatcacgttggcaaagaaaattagggatgcagaggggaatgtttataaagaagttattgccccagacaagaacaggaaaagaactctcgaaattgttgttggagtaattgcaatgattctttctgttctatttattggtggtagctttggagctgcggctgtagcggatgcttttggtggtgagggttattacaccgccagaatgatgctaggacttattcttgcaatcatttcttttgttttagtatttttcataaacaaaaatcaaaaagttattggttggtcaatcaccattatgggcgcaatcattctgtttatgtgcggtgactatggaattattccgggcattgtctacataattgatggcattttagcattagttagaaaataatttaggaagactcgttacatggctaaaaagattacagataaagatggaaaaacttatgtgcaagtaaaaccatggtacaagcgctggttgatttgggtaattgttgtaattgtcgctttatttttaatcggttcattaactggcaacagtgaaagtaaaagtagctctggatcaggaagtaatactcaaacaacatctccttctagaattactgttgattatgacgattataaagttcagtcttcaaaaacatataaactaaattacagcaatactgattgggataaagctgatgtaaaaatcaataaagttactgtatataaactttccaagccttatgaattcgattcagctagcgatggtaaatatgacattaacggttttattaaattagatatgactattaaagcaaatggtgatatttcaatttatccgcaacaaggtactgccgttattggaagtgaacaagaagatgctgttggtgaatcatgggatggtgatataaacgacggcgtagaaaaatctggagaagtttatattcctatcaaagaccttgatagcccttcaagcatttcagatattagatttaagtttagcgctaacgatcaagatatggatagcgatcatgattacgacttaacattgaatctagataacaattaatatatcttatcaccggcatttgccggatacataatgaccaaaatctgatgtcataaaaaatgaactataaaggagtaagatattatgagatctcgtttacgttacacttcaaaatggatgcaaatatatttggtggtttactttttcgcaatgattgctaacgtacttgttcaacattatttccgtcaatcattatttgctgatatttgtaattattttatcattcctgtttctagcacatttaccttttttgtattgtccttaatggtaaaagaaactgattctctaaataataaagcagataaaatgtccaagcacgactaagaaactagttataaaataaaaagccccctccgaagaaaggactacatcttaggatcagggctgttgagagcttgttcaaggagaaacttgaaatcatcatcatcatttgttaatgcttggtttctagcattctctagcgtaatattcctctgtccaagtattaatacagtttgtaagttcaacttctgccagtaagttaaagagctaagaaaggaatctattggtgaaatgttttgagatttaaaaagcatgactattttcctccaagtttaaaacatatttgtactttctggggaacaataataactataattatagcattatgggctatttcattcttctccaattggaataagttatttttatatttactgctagtagtagttgtattgttatcaattaatttaatttacaattttcatcttgagtatgaaaattttcaacagttaaatgacagttacattgagttaaaagatgaaaataaaaagttaaaagaacgtattgagaaccctaaaccgtcttcctcagattctagactaaattctttagaacatcaaatagctgaactaaataagaaagtttcatctatcgagcaaacaaatgatacctcatcgatgaaattaaaagacaacattacgagatctagtaaaaagaggacaaagtcaacaactatcagaagtaattataatttttctagtacttatatcgtcgataaggacggattagttcattttattaaaggagacaataagaatgacaactagcccaactataaacttcctagcagtaaatactaataaaaataaaaataaaatattaatgagtattactagtgattttctgcccatccaacaaataatccccttaaatgtaggtttgatatatttaaaacctaatacccaatataaaggtaatcttcaaatcaaatgtgatgataaaacaataattaatgatgatagtttactcttcccggaacaagaattgtcttcaagtaacgaaataattaatggccttgtaggagcaacatttaatataaatactcctgttataaatttagcggaaggcgcatacgctctaacactaacactaaaatcagccgatgataaagaacttagtaaaagatcaacatattttttcgctaaacatgagtaattaaatattttgtttagaaggatgtgaacatgaattgattgactccacaacaatcaatcaattcaaacattgatgtcattaaaagacgtgattattagggagtaatttatgaagaaaataggtcttatttgtactgctattattgcatgcatagttctttcaggctgcaataacttagcatcacaagaaatgcacaaaaaaagcgctgaatcatccagcgtgaaaaaacatcatactcatgacgaagatcaagatgatgacttttcattaaatcttgtaagttcagatgatcaagatactgattcgaatgatttagatattaatgttccatcagctaacacttcaactagttcagcatcaaatatccaagtaccccactttaattctaacggtactggttcccctacttctggtggtgatccaaaagttcaagctgaaaccgcaagcatacaacatgattggaacgttaagcaaggcatcgaaaaccctgatggaagcgaaacacaaaatttcaagaattgggtatctaagcgtgaccaagcagaagcaaatgggcaaagcatgccagaatatgatcaaaatcaacgatattaaacgggggaagattaatgaatactgaaagcaataagaaagaaccacaattttggaaaggtgatccttctggtggttttgcgaccggattagtcgccggattcatcatcgggctaatcaatatttgttcattcaatattccttggttgggaagaatctgtttcatagcaatttggctcgtcatgggtacacaaccccgatttaaggacacacgtacaccagaagaaattgctaaagataaagaagaacgagaacaaaagtttgaggaaataagagaacaagctaaagcaagagaagctgaacgtcaagcaaccaaagaacaaaaacgtgaagcaaaaatgcaaaagaatgagctgaaacttcaaaagaaccaacttaagattcagaaacatcaacttaaaaaccgcaataaaataaaatgccccaagtgtagaagtacaaacgtacaacctctcggagttcataagaaaggattttcagttggcaaggccgttggtggcaccattttggttggtggagttggatcacttgctggatttgctggcaaaagctcaaagaaaacagactttgtatgcatgaattgtggaaaacaatttaagaaataaaatcttgtccaaccaaattgatgacattaaaagctatttaatattcaagttttaaaccggtcgaaatcgaccggtttaaaaagcactataaaagaacatatgtacgggaaggactgtttattatgaataaaaatgaactgctggaatatatagatactaactccaccgccattactatcttcaaggataaggtacgtacagaacaagaagccaaaaataaaaagcgccaacctgctaaacgctggaatgacgctaaaatcgaacgcactgtagataaatttactgatgatttcatcagtaatgtttacgacaagttatataaaggggtgaaagccaatagaaatacaccaagaaataaatggattgagtttatcgaaactaacgaaatccttgatagtttagaagaatcagtaagtatgatggagattggagaagattaattatgtggatgcaagaacgcaatggaaaattccgcttctttgagcaatataaagatcctctaactaataagactaaaatcatcagtattacaatgaaagatcataaaaagagtactgctaagcaagctcaaattattctagataatcgcatatccaaagctttatcaaaagtcggtatcggaaaaataattcatggaattacactcaaacagttacttgatgaatatactgaatatgaaaagccacgaattaggagatcaacgtattatagccatcaaacaatggttaatactttactagatatttttggcaacgatgccttagttgaaaaatttaccccgcttatcattactgaaaaactagaaagtctaatgtatggggatagagagttgtccagtggctatgtatcacgatataagtactatctgcataagttatttgattatgcagtaaaacactcatatacaaaagataacccggttgataacgttaaaattgattataaggcccctgctaatggccaacaaattaaagacaagttcctcgaagctgatgaactgaaagccgtcctcaactatctatataacaatactcggatctacggagaactttgcgaatggttatatctcaccgggctacgttttggcgaagcagccgctttaagttttgatgatgtttaccaaaaggacaaccattggtttgtagatataaccggtacattagagtataaacgaattaaaatcaaagaacaaaaaaagagtgacgcacctaaaacatcatcctcagtccgtagtgttgtactaccaaagaaagccgttcaaatttatcttgatctgaagaaaaaatctaatggcaaaggttttatcttcgcaactgaaaatggcacaccgattcaaactgcctcagtaaatactgttttaagatcagcaaagaagaaacttaaacttaataaaccactaagtactcatgtatttagacatactcatatttcaaaaatggctgagttaggaattccgctatatgtaatccaacaacgagttggtcactccagtagtaagattacctcccagatatatcttcatgtgacacaaaaagcaattgaaaaggaagcgtcaaaacttgatgaactgtaaaaaacctaccaaaaacctaccatttactttaaaaaattatttttactctttcttttttcttaaaaaagaattttaaaacaaaaaagaacccttgatacacaagggttctgcactactagttgtcgcgacgacgttcagcgatacgagtagccttaccagtacgttcacgtaagtagtaaagcttagcacgacgtacacgaccgtaacgaagaacatcaatcttgtcaacacgtggtgagtgaactgggaaagtacgttcaacacctacaccgttactgatcttacgtacagtgtaagtagcactgataccagcaccgtggcgcttgataacaacaccttcgaacatctggatacgttcacgtgaaccttcaacaatccgagcgtgaacacgaatagtatcaccggcacggaattctggaatatcatcccgtaattgactagcagtaatcttttcgattaacttgttttgacgcataatatatttctttcctttcgccgacattcatgtcctgtatgacgggcagcggaataccgttattcacagctaaacagccaataactactatacattgttttcagctgtctttcaagggtaaattagtggttttctttattaatgattgaatgacgaattccatagataaagtaaattaacaaaccgatcacgaaccaaccaaccattaaaatttttgcatcagtatttaggccccagaagatcacggccgaaaagatcgccgaaattgctggaagtactggatataacggcatcttgaactgagcttcaggcaaatctaccccttcccgcggacgcaaggcataaattcccagagaaacaaagataaatgcgaccagggttcccgcagaaacaagggttgctaagaacgtaaatgggaaaacagaacccaagatcatagccaagaaagtaatcatccataatgcgtgattagggacgtgcttatcatcgatttggccgagtgattttggtagtaacccatcccgtccaaaagcataaattagtcgagaggaagctaaaaggattgcgattaacgcagagaaaataccaacaatcgctacaacggaaagcaagttcgccgtaatatagtgtccagactgtcttaaagcccaggctgctggttctgcattatttgcataacggctatatttaaacatccccactaatacgagcgaaaccgcaataaaaaagcctgttcctagtaatagtgtcccgatcaatcctcgtggcattgtcttttgcgggttaatcgtttcagctgtattagccgcaatcgcatcaaagccgacataggcaataaagatttgtgcagtcccagctaatattccctgccagccccaaaagtggtacctggttgatgagcagggagaaatgggacatagttttgcggatggattgcagttacgcccacaacaataaacattaaaattactaataactttacactaacaataatattttcaatccggctaacctgatggacaccgcgggaaattaaaactccaacaattagaattgcaaaggcggccagaatatcaatataagaccctgtatgtggatcaaaaccaccagttaaggcatgcggtaatttaatcccaaaactcccaagaaatccttgcatataggctgaccacccagacgcaacaaaagcgactgaaataaaatactcagctaaaagggcccagccagcaatccaaccaaagaattcaccaaacaaaacattgatccaggaaaaagcggaaccagcaaaaggcaggactgaggacgtttctgcataggctaatgccgataatcctgcgccaattgcagctacaatgaaggctaatggaactgcaggaccagtatgctcagctgccacaatccctggcaaagtaaagatagccgttcccactaccatcccagttcctaatccaattaagtctcttgttcgcaaactaggggttaattgtgcatccttttcttcataaacgcgggggttctgcttaagaaataatcgtttaattaattttttcattcgggtcaccttagtctggaacagttggatcttcatccagcttaatatcttctaacattaattgctgttcccgacttagcttagcagtttttaaaagatctggtcggcggtgaagagtccgtcgtagcgattcacgcatccgccattctttaattttctgatgattaccactcgtaagaacttccggtactttcatcccccgaaaatctgctggacgtgtatattgaggatattctagtaaaccgttactaaatgaatctcccattggtgaagacatgttgccgaggacaccaggaacaaagcggacagtcgcatcaatcatcaccatcgctgctaattccccgcctgttaacacatagtcgccaagagacgcttcatcggtaactaaattacggattcgttcatcatatccctcataatgaccgcagataaatgttaagtggtcttcctgggctaactctttggcataggcttgatcaaactttcgaccagcgggatccattaaaataacccgtccctttgaatactgatctttagtttgttcatgaattgcatccatagcgtcaaaaattggttgcgcttgaaggagcatccccgctcccccaccaaatggcgcatcgtcaacatggttatgcttatcggtagtatattgacgaaaatcggtcacattaatatcgataaatccattatcttgcgccttaccgataatggattcccccattgttgcttgaaacatattgggaataagcttaaaatatcaatcctcattattcaagtccttccattaattcgactgttacaagatttttatcaaggtcaacgtttttaacaacatcatcaatcactggtaataataactctcttttttctggacgttcaacaacccacacatcattcgcaccaggagataaaatttccttaattttccccagatgacgaccatctgttgtttcaacgtctaatccaataatctggtggtagtaatattgaccatcgtctaatggctgttgatcatcagcactgaccattaattcatgatcacggaattgttcaacaccattaatattatcgtagccgacaaacttaacaagaacaaatcccttatgttgccgcgtactttcaatcgtcaatggtaaaggctcacctgattgttgtaggtacaaggtatttcccttggcaaatcgttcatcaataaaatcagtagttgctaatacgcgcacttctccgcgaacaccatgagtatttacaattttaccaacattataatattccataaattcctcctgaaaagacaaaaactcccacagattagtgtgggagttttaaatttagtgacgatggtcattaattaataaccggactcgcttagagttagcccgtcgagattgagtaccctcgactattgttcgcaatgctgcggcaacgtgtccctgtcgaccaattagacggccaacatcattgggagcaacatcaattatataacgatggtaacgtccatcatctttttgggtaactgacaatgcctgtggctgcttcaatagcggaataactaaactacgaattaacgactcaatatctgtctcagccatgactgattatcactacttcttagcgtactttgcttcgtggtacttcttcataacgccagctgcttgaagcatgttacgaacagtatctgaaggttgagcacccttttgtaaccattccataacagcgtcttcatcaaacttgacttccttaggagtagtcaatgggttgtaagtacctactgaagtaataaaacgaccatcacgtggggcacgtgagtcagctacaacgatccggtagaatggacgcttctttgaacccatgcgctttaaacgaattttaacagacattctttgcacctccctgatttcttttaacagataataatataccagtgttcaaatagaatgtaaagtattttttcttgacaggcttaaattttttgaaattattttttctttcgtaatttacgaagctttttaatgcgtttttgcttgtcttttttcattttgcgcgccatgcggttcattgccatttgtcccatcttgccacctggcatttgtccaccaaacatattttgcattccattgaaattaccgtttgtaacctgcttcatcatcttacgcatttgattaaattgcttaatcatccggttaacttcaacaattggccgtcccgcaccagctgctaaacgacgacgacgactaggattcattagatcagggttttcacgttcttctggcgtcattgaaagaacaatggcccggatatgagcaaattgcttaggatccaaattaagattcttcaaggcaggattattagccatccctggcatcatcttaataatattttccaatggtcccatcttggtaacctgatccatttgtgccaagaaatcattgtagtcaaatgtgttttcacgcattttatccattgtttcttgagcttgctcttcatcaaaattcttctgggctttttcaattagggtcatcatgtcccccatacccagaatccgtgaagccatccggtcagggtgaaagacatcaagatcctccatcttttccccttcaccgacaaacttaatcggcttacctgtgactgcccggattgacatggcggccccaccacgggtatcaccatctaacttggttaaaacaaccccagtaatgttaagcttatcatcgaagccttgagctgtatttactgcgttttgaccagtcatcgaatcaataacaagcaaaatttcatttggatttactagttctttaatgtttgcaagctcatccattaattgttcatcaatctgaagccgaccagcagtatcaataatgacataatcattatgatttttcttggctacttccatcccttcgcgaacaatttccaccgggtcaacatctgtccccttttcaaaaacaggaacatcgatctggtcagcaacttgttgtaactgagtaatagcggcgggacggtaaacgtcggcagcaataaacattggccgcgcatgattttcattctttaatcgtaatgccaatttaccggcagtggtcgtcttacctgccccttgaagaccaaccatcatgataacagttggaatgtgcggtgctttgttaagaggaactgcttcttcccccatcagttttgtcaattcatcattaacaattttaacgatttgttgggctggatttaaccctttcagtacttccgctccggctgctttttcccgaacggtctttacaaagtcttttacaactttaaagttaacatcggcctctaaaagggcgagccgaatctcacgcatcgtttcccgaagatcagcttccgtaactttgggcttgcgtcgtaatttttccatcgccttttgcagacgatctgttaaaccttcaaatgccattttattcttcctccaagctttccagatgatttactaagtgattgagcgttgcatcgtctggatagttttctcggacgtatcgttgaattcgatccgcctgttgattacgaacttgaaattcagcatacaaatgcaatttggcctcgtaatcttctaatatgctttctgtgcgctttatattatcatatacggcttgacgactaacatggaaattctcggcaatttcgcccaatgagtagtcatccccgtaataaagctctaaataatcattttgttttttggttaataagggttggtaaaactcaaataatgaatttatccgataattcttttcaatttccatatcgtcatacctgcctagtcaacttcgactaatcccttgaacaggccataaacaaagtcgccagcatcaaacttctggaggtcatctaccttttcaccgagccccacatacttaaccggtaagtggagttcattacggatagcaaggacaattcccccacgagcagttccgtctagttttgttaaaacaatccctgttacatcggtactttccttaaatagtttagcctgattaagagcgttttgaccagttgttgcatccaagactaacaatacttcatgaggagcatctggaatttcacgagtaagaatgcgtttcatcttagctaactcattcatcaagttaaccttgttttggagccgaccagcagtatcaacgaacaagatatcatagttttcatcttttgcccgttttactgcatcaaagacgacagccgctggatcaccgttttctggtccggtaacgatgtcaacaccatcacgttttgcccatacatctaattgctcagtggcccccgcccggaacgtatcagcagccgctagaagaactttcttaccttgcttcttaaagagggcggccatcttaccaattgttgttgtctttccggctccattaacaccgacaaacataataacagttggtccttcttttgccatggttaagtcaggattttcgtcttgaccagctttatcgtaaagttcgaccattttttcaataatgacgttggaaacatcctgcttgctcttagcgttttgcagttttacttcttctcgcaattcatcactgagcttcattgccatatcatagccgacatcagattcaattaacatatcttcaagatcatcaaagaagtcttcatcaacatgccggaaattagccaagaacttatttaaccgtgccccgaagcctgtccgggacttctcaagcccgcgatcgtatttcttaactgtttcagattcttgatcctcttctggttcaggagaaggttgttgctcctgctcctcatcaccatcattttcttcagaattatcagtctcatttgattcttcagtagctgaggaatcttctgccacttcttctttagttggcattactggttcttcaactgttttttcttcttctgcaacgggttcggtcggttcaacggctgtttcagtttcagcagaattagaagatggttcttctgcagaaatagtttcttccggagtactagacgacggtacttctttttcagaaacacttgaggccgctatctcttctgagtgacttttctcgctagtatactcttctttttcttctttaaccctgttatgaagtatttcgtgagttccatccgggttaatcttttcctcatagctatcggcaggaggaatatttaccgtttccggatgaattggtgcagaagctggtgtcgcactcgtcgtatctgctgcttcatcttcatgtgcggtttcagattgaacaactgcgcttgaactatcaggcgttttttcctcttcttttttcttatgacggcgaaaaatatcaaataatcccatacttgaagcctcctaaattagttaattgtcactctcttgtaaagtatcaacaacgtccactgataccatctttgaaactcctgattcttgcattgtaaccccgtacagtacatcagcgtccatcattgttcccttgcggtgggtaatgacgataaattgtggaccttcagtaccaaatttgctgaggtagtgtgcaaaacgttgtacattgacctcatccaaggctgcctctggttcatcaagaattgcaaatggaactgggcggacttttaaaatagcgaatagtaaggtaatcgccgttaatgctcgctccccaccggataacaatgaaagatgttgatttttctttcccggtggctgggccataatatcgactccggttgttaataagtcatgaggatcggttaagacgagtttagcatgaccaccagagaaaatttgttggaacgtctcatcaaacttttgtgaaacctgattaaaggttgtaataaaccgtttcttgacttgggcatccatctcacccatcgtctgattaagctgagctcgagaggcgagcaagtcgtcttgttgtcccttcaagaaatcgtaccgttcacgaacacgctcatattcttcaatcgctccaacattaacttgaccaagatcatccaatccccgctttaatagcttcaaccgggtcgctaaggtctcttcgtccaagtcactcatctgttggcgagcttcatcaatggtcatggaatattgctcagataatcgattaagagcttgctcaaccattgattcatacttcacgcgctcttcatttaagttattacgatcatcaagggctgcccgctgaagttcttgcagacgattataatgtgcttcggcttgtgacagcttttgctcaagttcttcaagagcaactgaattatcttccagttgcaccttagcttttgcctgctcttctttagcatcttttaaggctgtctgtgtcgatttttcacttgttgattgactagctgattgagtcgttaactcagcgattgcaaccgtgaccttttctaaactctcctcagcttctcgccgttgacggttatactcttgactttggcgttgatattgttgaagtcgttcttcggccactgcaattttttgttgcatttgtgctaattgtcgtgcctgagtcgacgcatcattctgtaattcatcgatctgggtaagaatttgcttaatctttgccacaacttgcgtcaatttctggtttactttatcagcttgttcattattttgttgaacttgtgattcgtaatcctgatgttgagtgtcttgctgtttattttgggtttctaaaatctgtacccgattagtaagcgtctcatgcttacttgagatcaactggcaattactttcttgctcatgaaacttatcttgtaaagtctgaacttgttgctgataatcagctactacttgttcgttcgctttttgcgcttgttgtagtttagcaatttcttgctctaagtttgctgcaagctgttcctgtttttttagctcttcttctagttgcttagccatttgcttttgacttaaaagtcctgttcgttgactacgggtggctcccccagtcatcgctccactagcattgatcaactgaccgtcaagagttaccacccgtaccatatgacgacctgcacgagcaatctcagtggcatgatcaaggttgtcagcaataaccgttgttcctagtaagtggtcagcaataatctgaaacttttgatcaaacttaataagttctgttgctcgacccaaaaagccagggagaccagttagttgtggccaaatgtttaatggtcgccggtggctaagcgtatcaagcggcaaaatagttactcggccagcgcgagtcttaatcaagaagttaataattgctttggcagtagcttgccggtcaacaaccaattgctgaagctggcttcctaatactgtttcaaccgcttgcgtgtacttggcaggaacatcaaataattcactgactgctcccgccaatccaggaaattgctgccgttgccgaaggacttcttgaactccccggtaatagccgctatattcatcggccattgactgataagcgttaattcgcgacttaagcgaccgtacatctcctaatgctgcataccaatcacgttgttttgtttggtacccgtaattaagtttttcacggtgatcttgagctgcttttagtttttcactgacagtctgtaggcttcccttagtaatggctgcttcttgttggtagcggtcatattcttgattaatttctgcaagctggttcttagtagcgtcaagttcctcgacattctgacgttgaagactcatcgcctgttcatgattacgtgacaagaaagattgctgattatgaatcgttgttctttcctgcatcaagctaacttgttggttacgtaaatcctccacttgctgttttagggtcgcgatccgctcactgctactcatctttctggctgtttcaaactcagcttgctgaccattaatcaacgctttttgttcagccaattgctcgtcatttgcctgttggtttgccttaacctcttttaaacgtgcattgagttcagcctgttgggtagttaaccgccgttgctcattttcacgttgttcacgacgaacactagaaacagattgctgattctcatacttagcaattgcctctgtctgatttaagataatcgcttggagacgatctttagttgcgtttagttgttgacgcttttgcttcaaattatcaagctgttgctgatcgcggtctgcttgtccttgatagtcccttaccatcgcttctgcttgatcgagcttggcacctaatttggttaacttttcatagtactcgtcataatgacgaaccgtttgtgtccgatcaagcacatcaaattgtttcttttgttccaagtaatcttgggcaattgcactttgctcttctaaaggttcgatctgcttttctaactcactaataatgtcatttacccggttaaggttttccatcgtcgtagtaagtcgcttttcagctgtttctttattcttcttatacttggcaactcccgcaacggtttcaatgattccccgccgatcaattggtttaccgttaaaaatttcttcaatccgtccctgggaaataatggaaaaggattctcgacctaaaccagaatcaatgaataagtctgtaatgtcctttaagcggacgttttggtcattgattaagtactcactatcaccattgcggtatattttacgagtaatggtaagctcagtaaattcactagctaagtaatgatcgctattatctagcgtaatcgaaactagggctcggtttaaaggtttacgatctgatgacccattaaagataacatcagccatccgatctccccgtaaatgatgagccgactgttcgcccattacccattgaatagcttcaataatattactctttccactaccattcggaccaacaatccctgtcattccgggctcaaatttaattgttgttttttgggcaaaggatttaaagccgtccaaagttaaagacaataattgcatcagttattcctacttactatttatttttatttctcatattatcaagtgcctgttgtgctgcttgcatttcagcatgcttctttgatgagccctttccttcaccgataacgtcaccgttagcagtaacatttactttaaattcagggtcattttctgttccgctttcctccaccaaatgatattcaatggcaatgtcaccgtcacgttggagaaattcctgaagactagtcttggcatcaacagcatgatcaaaccagcccatatcaagtttaggaaagataacccgttggacaaatttttcgactgctggtcggccttgatctaaatagagggcaccaataaatgattcaaaaatatcacatagcaagcctggccgttctcttgcgccggccatttcctcaccatgacccaagcgaatatattgatcaaaatgacattccttggcaaatttagaaaaactatcttcacataccattgccgctcttaagcgagtaagttttccctgcggcaattcagggaaacgtttatatatatattctgaaacgatcagttccaacacagcatcgccaagaaattcaatccgttcgtaatattttaatccttggttaggatgttcatttacatacgaagcttgagtaaaagcttctgctaataaagcaggattatcaaaatgaatattaaattccttggccaggtagtcttgtaattctttgatcataaaaaattcctttcgtttttgacttaaaattattaaaaatgtctaaggcctattatactaaataacccgctattccgcaggtaattttaataatattcgaaaaaattaaaggctgtgaaaaaactttcgccttttctcagccccttacttttctaccttaataaaataattaaacggtttgattagttggcagtatgttctgcaatgtaatcaacaacttcaccgattgtacttaacttttcagcatcttcatcattaatttcttcgccaaacgtatcctctaattcgagaacaaattcaacaaagtcaattgaatcagcatccaaatctgtctttaagttcaaatcatcagtaatcttagcccgatcaacatcaaaatggtcagcaacaatctctgaaaccttattaaagatttctgttttcttattatcagccattattattaacctctctttactagttcgctacttattctattcgtttttcttagaattgtctagattttcggtgttatcaaaaaattcaactgttttttcaatcacacccgttttgatcatcgttctgatttgactaattgtatttttcactgctaaagcatcagcagatccatgagtcttaacaacgggggccttaagtcctaataagactgccccaccataagttgaagcactcattttttgcccgatttgatggaaaacgggctttagcataagataacctaacttagcacggagaccaccatgtaagattccatctttaattaacgtcatcatcatcttagcggttccttcagtcgctttcaaggccgcatttgccgtccacccatcacttacgacaacatctgccttgccaaacaggaggtcgccagactcaatattgccgacaaaattcaaatcgtctttgctattgaggatttgccatacttctttatgtaatttgtcacccttatcttcttctgccccattgtttaatagcgcaatccgaggattcgcaactcccaatacattttcggcatagaatttaccaaggtaagcatattgttccaaatttttctctttactttcagcatttgcaccagtatcgaggtagacaaaattatgtcgactagcacccggcttggcaattggcaaaatactagtgagtcccggacggtcaattcctttaatacggccaacaatgaagaggccggccgccaaaattgccccagtgtttcccgcagaaaagaaggcatcagcttttccttctttaactgctgttgccgcgcgaacaattgacgaatctttttttcgtcgaatcgcccggactggttcttcacccattgaaatctcttcactggtagcaacaatattaagccgctcattattttttattaagggtttaaccttgtctggatttccataaaggtcaaattctaggtcggggtaaaggtctcgggcctcttctaccccttcaatgattacttggggagcattatctccacccattgcatcaacagcaattttcataaaatttcctcctcatattagtcaaagtgcgtctccagttcatgacgctttaaatataaaacaagtggctgattttcattgacctgatcccaattgggcatccctaataggttcccagcatcagcacgggcaatttgcagcattttcaaatcagcaaccggatcacccactttaaattctggcatccccgattgcttttttcctaaaatatctccagatccccgtagtttcaagtcttgttcagctatcttaaatccatcatcggtagcaaccatcgttttcatccgggcttttccttcatcagttttcggatcggcaattaagagacaataactttgtcgactgcctcgaccaacccgaccacgtaattggtgaagctgtgcaagcccaaaacgatcagcatcatatataaccattaccgttgcattaggattatcaacaccaacttcaataaccgtggttgcaactaaaacttgaagctcaccagatttaaactggcgcatcgcttcatctttttcttccgtccccattcgtccatggagtaagcccactttataagctggctcaagatcggccgatagctgattataaagatcagtcgcgttttgtacatctagagccgctgattcctcaatcaaaggactcacaacatacgcctgtgctccttgctttaattgttcacgtaagaaatggattgctgcggcatgttggttagactgcagccactttgtttgaattggttttcgaccagccggtaattggtcaattatcgaaacatccatttcaccataattagtaatcgctagtgtccgtgggataggggtcgctgtcatggctaatacatcaggatgttcgcctttttcacgaagttgctgacgctggttgaccccaaagcgatgctgttcatcagtaattaccagaccaagattagcatactcaactccatcttgaattagcgcatgggttccgacaatgaggttgacatccccccgcttcatcgccgtcaatagttcccgatgttgcttagcagtcaatgaaccagtcagaagagcaacctggacatgggttccttcaaaaattttcgctaatttctcagcatgttgtcctgccagaatttctgtcggcgccattaaagctgcttgataaccggcagtaatagctgcataaatggcaatagcagcaacaattgtctttccagaaccaacatctccctgtaacaatcgattcatctggtatggttgacgcatatcacggcaaatttcattaacaacccgtttttgggcatcagttaattcaaatgggattccgccaataaattcttttaactcgtcattatggtataaaatccgctcgccatcttcttgacggtgggcacggcgaattgcttgcagtcgtaactgaaacaggaaaaactcttcgtaagctgctgttcggcgggcggcttttgcagttgcctgagtttgtggaaagtgaatttccctaatcatttgtcgccgatccattaaccggtatcgttgacgaatcgtttctggcaaatatgttggaatgatattggcatattcctcgtaagcttgacgaataaaactttggaggacattttgccggatatgcttattcaccgcatagaccgcaccaaactcatttcgatcatcagctttttccttaagaaacttgtttcctgttacttgacggcgagatgcatcccatttccccattacagttacttgctgatttagttcgatttgctttttaatatagggctgattaaaaaaagttgcgatcaccacttcattacctacctgcattcgaaaggtaagccggttgcgccgataaccatagcggaccaagagcggttctgacactactactccttgaagagtaattttctgtttatccttggcgctttcaatgtctgtaggcgtgaaatcgttatagcgagtgggataatacgtcaacaaatcttcaatagtatctattcccagagtagctagatctgctacccgcttaggaccaactccttttaaattggcgacggaatccgttaaactccgcaaatctttcacctcttttttaacacaaccagtaaccaaaataggagtgggaataaaagtagtcctttattaacccacccctataggaattaatttaatgtgccgctattcaaccgaaatcaggtatggataaactggctgaccaccatcgtaaatctgaatatctaattcatcatctacttcttcaactgctgctttaatctcttcagcagttttttgatcaccaccagctccatataagatcgttacaatttcactatcctcgtcaagcatggctttaaccatcttaatagcggcttctttcagctccaaatcagtagtgacgattttaccatcaacaattcccatgtagtcatctttcttaatttcacgaccatcaattgttgtatcacgaacagcattagtaaccgctccactggcaaccgtatttgtattagcttccatatttgcttgattttcgtccaaagatgcttctgggttgtactcaagcaacgcactcatcgcttgggcaatcgtcttactgtggacaatttttgttggaatatcagcaacttcagcagcttgatcagcagtcataaagatgttgccgttatttggcagaacaatagcttgcttggcaccactattattaatggcatcaagaatatcttgagtgcttgggttcattgtttgaccacctgtaatgatatgggtaacacccaagctctttaataatttcgctattccttctcctgatgcgacggcaataacagctgtctggaggtcctttttagcttctgcagctgcttttgccttctcaattggcgactcactgtcagcgtcttcttcatctttttccatgatctcttcttgttgccaaaccatgttatgaatttcaattgtctgtaaatcaccgaattgttgaccccaagataaaactttaccaggatgctcggtatgaacatggacccgcacaacttgatcatcgtttagaacaagtaaactatcgcctaagtcagctaagtagttatagaaagtatcatagtcaaacttttgagtcacttgtttacccttaccaagtcgtaccaacatttgagtacagtaagtatacttgatatcttcaggattaagctttccttgaacgctttggtgatccatggcgtgaaccatctcatcaatttcagcattgtcaggtttatagtcatcacttttatctacgcggccactcaaggcttcatcaaaggcttgaagtacaaagacgagtccttgcccaccagaatctaccacgccaacttctttcaggactggcaataaatccggcgtctttttaagcgcttcttcacctgcttcataaatagtatgcataatctcaacaagatcatcagtctctttaatcttattgaggcctgcttgagctgattcacgaacaacagttaaaatggtaccttctgttggcttcatcacagccttgtaagctgtctttgcaccattagcataagcattaacaaagtcagcagtagataaaacatccatgccttctgttgcctttgcaaagccacggaaaatctgcgataaaataaccccagaatttccgcgtgctcccatcaaaaggccctttgctaacgctgcactcaggtcgccaactctcttactggtttcgttgcgttcgtacttggcaccgcttgccattgaagaagtcatgtttgtcccggtgtctccatctggaactggaaaaacatttaatgaattaataaattcagcgttcttaccaagtttatcggcggccgcctggaccattttaccgaattcaaggtttgtaatttttgttacagccaattcgaaattcctccccaatgctcgcttaatcttctagtgtccgcacaccttggacacatacattaactgaatttgccgtaataccgagcattgtttcaagattatactttacctttgcttggacactttttgatacttctgagatctttgtgccatagcctacaataatatttacgtcaacagctacaccattatcttgctgccgaacaacaacgccgcgcgcaaaattttcacgacgaagaatttggttaaccccatcacggagggggtttcggcttgccattccaacaacaccgtagttatcagtagcagccccaccaacaactgatgaaatcacatcattatcaatgtcaattgtacctgacttagttttgatttttactgccatcgtcatggcctccttataaaattaccaattgattttagaatcctatgatactaaaattcacaattaaatcaataccatcataccatagcatatttcactaaaaaagtaactgatggatatttttgcagtcgatcaatggggttaatcaattaacgtaaaaaataagccgcccaaactggacggcatcattttaattaaacccgagtcactttacctgacttcagtgtacgtgctgaaacgtataccttcttaggcttaccattaactaaaatggttaccttttgcaagttaggcttccagctacgccgacttgagttaagggcgtgagaacgcttattaccaaattgcgtccgtttaccgttgataaaatctttagccattggtgataccctcctctttgcttcataattttttcgtttacgcaaaactgcgatgtaactcacctaattaatctaccataggcatcgtaacaatgcaatagttttctttcaagtaattttccttgacagggtattttcccctcaaaaacctattttaattggtcgctacactgaattacagaaataattccactttcaaatgaaaaatgattttcttcagctgtaaattcattgcttgtccacgaaaatagaatttgactactccagttttgcagtggatatttttcgtcttttaacgtaaggcctcgaacaggagtaagattgacaaaggccaggtacttcttatgcggcaggcgagaaatagtgtaatcccctggcaagtagtaagagacaacattttgacagtcaataatcttaatcttggttaagtatggtttaaattcactctgcaacggaagaaagaggttagctaataaatgatctaagcgtcctcccgttgcaccaaaaatttcaatttcatcagcctgttcttggattgcaaatttcacgcccaattgcgtatcagtataatctttttcaggaggataagtttttatacgagtaattttaccttctaaaccttgcaattcctccccggtaacggaatcaaagtcaccaattgctaaaaccggcttaattccccaccttaataatcttaaagccccccggtcaaccccaatccatttttcatctttacgttgcaaaatcaactcggttggaaccatttcaagcggaccgccaactagtatatttactctcattttttactcctaaaaaaatggatcttcaatattcagacaaatccgaactagaagatccatttttgttttttacttaatgtgactaattacttagtagcatcttcaagagccttgattcgttcagcaggatcttcagcgttaaagacatatgaacctgcaactgctactgtagcaccggctttgtagcaatcgacaactgtcttatcgttaactccaccgtctacttcaatatcgaaattatagcccttttcttctttaattgcgtttaattgggcaatcttgtcaacggtttccggtaagaacttttgaccaccaaatccagggttaacagtcattaccaagacttggtcaaccatgtgtaatactggttcaatcatcgctactggtgtacctggattaataacaacttcggcttttacgccaccgtttttgataatttgaagagcacggtgaatgtgttgagtagcttctacttgaacaccaataatatcagcgccagcatcaatgaacattggtaaaatatgttctggactttcaaccatcaagtgcacatccaataccatgtttgtaattggacgaatagccttaacaaaacctggtccgtaagaaatacttggaacaaaggtgccatccataacatcaatgtgtaagtatggtgcaccggccttttctaccttttcaatgtccttttgtaaatttacataatctgcacttaaaattgatggtgcaactttaatcatcctgattccctcatttcttataatttggtttttgattagcaatcaattcatggaactgaagataatcatcataccgactcttcatgattataccattgtttaccgcttccttcacagcacattgtggttcttttatgtgaaggcaaccccgaaacttacaatcagctgaaattttagccatttcagggaataaatgcggcaaatcatttaccgtcatatcaaatgtttcgtacgatgaaaaacctggggtatcggctatcagagcaccgttaacatctagtaaacttacttttcttgttgtatgccgtccccgttgaagcgcttgggaaatttcaccagtcgctaattttaattggggagccaaatgattaagcaaggttgacttccctgctcctgtctgccccatcattgttacaatatttccctttaattcttccatcaaacttactaattgatcagggttaaagggctcacgggccgcataaacatggtagccaattttacgatagccctcgatcgttggtaaaagttgttggtactcatcatctgtcagtaagtcagtctttgaaaaataaattaaaggagtaacatcttgggcttctaaagcaatcaattgacgatctaaaaggttagcggaaaatgctggttctttagctgaggttacgacaactgccatatcaacattagcaacaggtggccgcaccaactgattgcgacgaggcaagatttttaataaatacccttcctgttgattttcagcactgaattcaacatgatcgccaactactggcttgatctttcgttgacgaaagtttccacgcgcccttgtccgataaatcttttcatctgcaattacatcataaaagccacttaatgattgttggattattcctattttcaaactgcacctccattatccagtaatatttgttgcactcataatcgttcgtccattgcgaacaacacggtatgcacctgtttgtccttgtttaagggtaaatggcacattaattgttgtttcctgattaattgtaatatcttgatactccattgttaaattatggttggcatctctgatatatacctgtacacggttttcacgctggccaccatttccatcgaatggaatgttaatctgaatattcgtcgtctttgtttgattaccagaattagcaatggaaaccgttaacgtatcaccatgatttaatgtcgatccggctcgcggcgtctgattaatcacatggttagtcgcgattgtttttgattttttctcttgagttgtcaattgcaaattatttttatttgcaaactgttgcacagcactaatatcttgattcttaaagtttggaatcttaattggttctttccctgcgcttacccgaaaaataattgtgttagcagcaggcttaacaatcgtaccttttttgtggttttgtctgataatctgtcccttatcgatatcatccgaatacactggttcttgatgaacttgaaatcccttgcgacgaaggttagcggctactgaagaatagtcctcaccaacataatcagccatttgcaattgcttaactcctgtactaaccgttaaattaattggggtactaacacgggtcttatggctgacgtcaggattagttgaaacaattcggtttttatcaaccgcctgactatttactcgagtaatcttaccaatccgtaagttttgctggtgcaatcgttgttctgcctttagcactgtcattccttctacatcggggatgattacttgacggatcaagaaccaccagctacagactgcaatcagcacaatcatgccaagcgttccactaacaatcccatattttttccacttttgcggtttagttgatggatcaacggttggtgaatcagttgacttctttggttggtaatcatcagcttttaggtgtttaatatctaacaccttagtttctccattatcatcttgttggatctttaaccgcggctcattagctctttgtggatcaaggacggttttcaaatcagccgccatttcatcaactgaactataccgctcagctggttcctttgctgtcgctttaatgattacgttttcgagtgcttgaggaatttctttattctgttcacgaacagaaggtatttcttcgcggaaatgcttcaaggcaattgagacagccgtttctccttcaaacggaacctttcctgttagaagttcaaacaagataattcctagtgaataaatatctgattgtttagtagcaatgcttcctcgcgcttgttccggggataggtagtgaactgaccccatcaaggtattagtctgcgttaatgagtcttgcgatacagcaaccgcaattccaaaatcagtaattttaacgtttttattttcatcaattaagatattttgtggttttaagtcccggtgaataatcccatgagcatgggcggtcgcaactgctgaaagcacctgttccataatatcaataacttgtggaagtggaatcggatagtgcttttttatatatgctttaaggtctgtcccctttacatattgcattaccatgtattgcaagccatgatcctcatcaacgtcataaattccaacaatatgaggatcatttaattgcgttgcggccattgcctcccggtgaaatcgccgtttagtacttggatcgtcccgtaagtcaagacgcaatagtttaacagaaacgtctcgatcaagaaccatatcatgtgccaagtagacattagccattccaccttcacccagtgaccgaattatccgatatcggtgaccaatttcatatccaggattcatttcctatccctcctggttactattaatcccaattaaaacggtaatattatctggtccgccggcatcatttgccatttttataagttgagcacatttctcttcaagcggtctcggcaattcaatcaccttgataatccgctccttagaaacagtcttaaacaagccatcagaacacattaacagttgatcaccttcatttaattcaaagcggtttacatcaacttgtgcatcctgtgagattccaattgcccttgtaattatattgctctggggtagctttagtgcttcatcttctgatatatctcccgtttttaccaattcattaaccaatgaatggtctactgtaatctgcgttaataggttttgatgaaggatatatcctcgactatcaccaatgttagcaaccacaaccgcatccttaaatgcaatagcggcaaccattgttgttcccatcccctgcaagcgaagattacgtttggattgcgctaagattttattattgattaattgggtttcacgagcaaaccagcggatcccttccatcgaagtctgcggaggcctttttttaaactgactccccaaagtcgcaactgtttgctctgcagcgatatctccgctacgattgccaccaattccatcagcaataaccattaattgattgcctagcttgttagtaaacacagcaacccggtcctggttttgctttcgttggtggccgatatctgtttgataagcagctttcattaatttattatattcccttcttaaggctactgacgaagaagccatcagaatcaaaatcactcggtaatatagttaaggttggtgagtgacgattatccttaacttttcgtgcagttgttgtttttactaactcaaactccggatgttcagctagaaacgcttgaacagtatcatcattttcttgctgtaaaattgtgcacgtgctgtatgtgattataccgccttttttaacttttgcggcaaccgcatttaaaattgctaactgaatcttatgtaattgcttgctatcatttagcgtttttgtataacgaatttctggcttccggcgtaaaagtccaatcccactacaaggcgcgtcaactaagaccttgtcaaaactttcatcatcaaaaagttgatcaacttcccgtgcgtcaagggcatgagcagtaactcgcttttcaacccccagtcgacgagcattcttttcaatcaatctaaccttatgttggtgaatatcaagtgcatcaacgtggccgtcttcattagtgagggcttctgctatttgaacagtctttccacccggagctgcacaagcgtccaggactttatcccctggctcaatatgcatgctttccacggctaacatggcactttcgtcttgaatagtaatttcgccatttttgaagagatcggaactgataatttcacctttagtaattactaaagcattttgcgcaacttgactttcttgatattcaattccagcagcatctaaagtttgtttgacggtcggaaggtcagttttgacgatgttaactctaattacctgatgagccggctcattaattgattgaagtactttttcagtattttcttcgccatattccctagtcagctcgttgactagccaccgtgggacactattttcgatacttaaccgcaaatcacgttcatcaatttgccgcaggtcaggtaatcctttccgcaaaatggcatgtaaaacgccagtgacaaactttcgaatacctggatttcctcgacgtttagctatttcaatactttcgtcagttaccgcccaatccggaactcgttctaaataatgatactggtaaagtgcagacaagagaagcgtctttacccaaggatcaagccgttttccctgcacaaacccatttagccaatattcgagggtaagtttatgctgcaaaacaccataaataatattagttgccaaccggcgatctttatctgccaacgggtacctttttaataactggtcaacctgcaagtttgagtatgcaccattttcgacaactccttcaagcgccactaaagctaattcacgcgcattttgcggttgaaatttagtcttcacttacaacttggcctccctctgtaatatctttatgtccattaaggtaagaagtaatatccatcgcctttttccctgctggctttaacttattaatctggtatgtcgttccatctccagcggcaattactaattgatgcttcgtgacccgcactactttccctggttcaaggtctgttttttcttctaatggggtcacatcataaatttttgtgcgtaatccatcaataatcatattaccaagaggagccggccgtaatccccgcaccttcgcatcaattaaccgtgccggaagtcggaaatcaatctgttcttgttcactagtaatgttgggagaaaagactactttatctggatcttgagcgaccggattaacatccccgctaataagtttaggcagcgtttctaacagcaagtctcttcctagcaaactaagctttttaaacatagtgccactatcatcagtgtcttcaatcggaatagacctttgtgaaataatatcgcccgcatccatcttcttaaccatgtacataatggagaccccggtttctttatcatcattaataatggaatattgaattggggcccctccacgatattttggcagtaatgaaccgtgaacattgattgctgcaattttagcagccgccaataactttgttggaaggaattgcccataagcagcagtaatcattaagtcaggctgcaaattaataattttctccatttcaggacttttgctgagtttagctggctgtaagacttcgatattatattgttcagctaattctttaactggcgattgatgaagagtacgtttccggccgatatggtggtctggctgggtaagaactgcttgaatatcgtattctggattatcaattaaactttgtaaaatcggaacagcaaactcgggtgttcccataaaaacgactgatgttgacattaataacatcctttctttcacataaaatactgtggatctggatcgatacttacttggacatccttaaaaccgcgactttgcgtatcctgaagaatatcaaacaatagctgatgcaagtaaggatccttcttatatttgatgacaatttggtaatagtaacgacgcttcatccgggcaattgctcgcggagtggggccaagaataaccgtcgaagataataatccctgctttaggcgaccatagatatctgccattgcccgagctgctttggcttcttcgggatgactggccatcaaacgaacggtgtaatagtatggcggataacttgcttgtcttcgtagcatcatttcctggttaaaaaatttttcgtaatcgtgcattttggcatcttgaatagcgtaatgatcagggttatatgtctggataataacttccccctgcttatttgcccgaccagcccgaccgctaacttgacttagcaaatcaaaagtccgttcactagcacgaaaatctggtaagcctagaccagtatcagcatttaaaacccctactaaggtaacattagggaaatcaagcccttttgcaatcatctgggttcctaataaaatatccgcttggtattgaccgaactgtcgcaataattttgcatgcattcccttccgccgtgtggtatcaacatccatgcgaataatccgggcctggggtaataattgatgcaattcttgctcaaccttctctgttccagtcccataatagcgaatctgatgactatggcaattgggacattcacgggggattggttcttcatgaccacaataatgacatttcattgtccgcgtatccatatggagcgtcaaagaaatatcacaattaggacattttaaaacatttccacaatcacgacacatcataaaggatgaaaatccccgtcgatttagcattaaaatactttgctcgttcttttgcaggcggttatttaattcggttaatagtttttgagaaaagttactctccccgtactttttaatttcatctcgcatatcaaccacttcgattggtggcagttcctgtttatttacccggtgaggaagacgcaacaagtgataaacgttttttactgctcgcgcacgactctccagactaggagtagcagagccaagaactacaggcgcttgattatattttccccgccatttagctacttcacgcgcctgataacggggtgattcatcttgtttataactagattcatgttcttcatcaagaatgattagccctaaattagttaacggagcaaagactgctgaacgggcacccacaactacttgcgcttctccacgttcaatccgtcgccattcatcatatcgttcaccattcgataaactactatgtaaaacagcaaccttagagccaaatcgtcgccgcacacggttaacaatctggggcgttaatgaaatctcaggtacaagcattaatgctgtctttccctgttgaagagcattagcaatcgattgcaagtatacttctgtcttgccactccccgtaactccttgtaagaggaaaactttagggtcatgattgtcgattgcttgattaatctggttaacagcattttgttgatcggcgttgagctgcagggggctgctaaatgagcatcatcaggagtgccctgcatagccaagggttgtcgatatacttcaactggtgttttttctagccatcccttctgttgtccctgattgaaggtggctgcttttaaaccagttttatgttcagcatccttttgcttaacaacttgactaccaattgattgtaaatatgaaagaagacggttttgagcatgagcattagcatgaagggatgcgcgctcatcttccagttgttcaaaattaagcaaagagcgaataccagtcaccgttttagctttggctcgatcctccacttggtattcaatcgttatctttccttccttttgcagtttgaacaatttacttaagattgccggtttatcttgtaccgccgccatttctaattcatctcgcccatgaaaaatgtcaaaggcaacatactcgtctacttcatctacaattcgaataattctggtagtcttagccttcaataagttaggcaacatcgtatataagcaagaaatccaaaaagagtaagtagtatcagctaaccatttgctaagattcattaattcaggattaattaccggttgaagatccattatcgcctgaattggtttgagttctccctcatattgggatgcattgtcaagggcaacaacaaatccttgaacagtacgttttccctttccaaaaggcacaatcactcttactccaacttgaatttgtttttcaagttttggcggaatctgataagtatatggttgatttgtttgcattgttggaacatcaacaactacctgtgccaactctggcatttaatcacctgactttaattttgcactaattaattcaataatctcgtttgcaattttagctttagattggcgggctaatttaattggcgtttgatctttttgtaagatggtcacttgattctggtcactgccaaatgctcccatatctcccgccacactatttgcaataatcatatccgcatttttgctagcaagtttacgattagcattttctagaagatcatttgtttctgccgcaaacccaacgatgtattgaccgttttgcttcatcttcgcaatattctttaaaatatcaatagtttcagtaagcgcaatggtaagatgcgggttaccatcttttttcttaattttatgatcaactatctcaactggacgatagtcagcaactgcggccgccatgattaaaatgtctgcctgcgcaaaacgttcttttaaactggtatataaatcttcagttgtgattccgcgcacaacttcaatcgctggtgattgtggaagggggacggtaacttgaccggcaatcaatgttaccttagctcctgcttggaccgcggcgttagcaagtgcaatccccattttaccagaggaccgattaccaataaaacgaacaggatcaatattttcacgtgttccaccagcagtaacaatcacgtgtttgccctttaatgcttgactgctagctaaaaaatcttctatatattggcaaattgctgctggttctggcaaacgcccgtgaccagcatatccttcagctaatcttccactaactggcggcataatattgaccccatcttgtttaagttgagtaatgtttcgttgagttgcgggggccaaccacatatggctattcattgccggaactacaattttaggagcattagttgctaataaggtggtagaaacagcatcatcagccagtcccattgccattttagcgattatatctgctgatgctggtaccactattgctagttctgaccaatcagctaactcaatatgaggaataggcgttgaatgctcatcccataggtcagtaagaactggtgctttcgtcaaggcaaaaggagtagcaggagtgactaacttagtagcggcgtcagtcattcctacgcgaacctcatgtcccattttttgcagtccacgtactacttcgattcccttgtaagcagcgatactgcctgtaagatacactgcaattcgtgtcattatgtcacctcaacttattttttcttaattgattatagcatttttagaagcaaaaaaggggccagtgacaatcctgccctagtcccttacttttgtttatccagcttaatttaatcctgtaagtcttcagtatgatcaggatcgatcgtaacttttccagccaaaatctcttcaagggccttcccaactgacttgcttgaatcataatgttcaagtaatggggcagctcctgcatctaattcattggcacgcttactagcaagcataactaatgaataacgagaatcaatatgttttaataattcatcaactgatggaaaaaggatcatttttcggcatctcctaacatttcaagataacgtggcattacacgggtaacacgaagccgttcagtacgaataatgtctttaatcttttcaactgcatttggtacttcgtcattaactactgcataatcatagttttgcatcatttgaatttcactaaatgctttatgaattcgtttattaatgacttccatactatcagttccccggtgaatcaatcgttgttttaattcatccaaatcaggaggggttaagaaaataaacacgccatctgggcacttagaccgtacttgcattgctccgttaacttcaatctcaaggaaaacatcttttcctgaatctaaggtctcattaacatattttaatggggtaccgtaatagttgtcaacatacttagcatattccaacatcccaccagtttgaatttggtgttcaaactcttctttgcttacgaagaaataatcaacaccattaacttctccaggacgtggttttcgagttgtcatcgaaattgaatattgaaaatcattatcatttgaatcaaagatagcttttcgaacagttcccttcccaaccccggaaggacctgaaagaacaattaacattccacgatttgccattataacgctcctatttatttaatcgtattaatactataatgcactagattagtactgaaatcaagcacctgaataacaaaaaatcattgagctttttgcttgcatttctgaatgtatgttcgtatactataatcaaacgaatgttcggaggcgcgattatgcaaattgaacaaaagtctatttttaaatttacgccacaaattattagtgataagcttcggcatctttttgaagaagcacctgctgacgatcagcaagcagggttacttactccccaacctgctaaacaacgacaattatttttaaaacgagccattaaagataaaattaaagcaacgtttcagctaatgccaatcaacaacgatggctatcccgtaaacgttaccggtaacatcgcccaattagcgaatagcaatcgataccttattacgaatcaaaatgtaagttatgttgttaactttgatcaaattagatacatcgcgaatttataatattggatttaaagagagactgggaattagctcagtctctttattgttttaaagatatttatacagtagctgcctggattccgatcgttgataaggcaccccaataggctagcttcgcgtcgtagctatcctcgtggaggaagacgaagtcgcaagtgacttctttcccactccctcttttttattttgccatattaagcaattcttgcgcatgctcttttgtcaactgagtaatcttttcacccgatagcattcgcgcaagttcttcaacccggtcgttttctttcaatggtgtaactcgagtagttgtccggtcatcatggacagatttcttaataaggaaatgatgttgcgcaacggctgctacttgtggcaggtgcgtgatacataaaacctgtgaatgttgagcaattaagcgaatcttatcagcaattgcttgggcaacccgtccgctcaccccagtatcaacttcatcaaaaatgatactagtaacgccttccttttgcgcaaaaattgtctttagggccaacattacccgtgacaattcaccaccagaagcaattttagctaacggccccattgattctcccggattagtccgaatataaaattcagcctggtcaattcccgtcggtgtaaattgttcccgactttgattagcaaagtgaacttcaaattctgctttttccatgtaaagctctttaagctgctggtgaacttttttaccaagctcatgagcagctttttgtcttacctgactcaatttacgaccggtctctcgaatcttattttcggcttctcctaaccgttgctctaggtcactgctagaatcagccgcggcctccatcgaatcgagttcttttttgatcttatcataatacttcaaaacatctgccaatgtatcgccatacttatgttcaagatcaccgatagtagttaaccgttgttcaatctgagctaaccgttcatcatcaaattcaagcatgtctaattgttgactagcttcattcgctacatcttgaagagcgtaataagcatcattaagagccttactaagattatcataagcatcatcaaattcagcaattgcattgattgagtccatcaccgtggcaacttgatctaaaacaggcgcttgctcaccttcattaaaggtcgtcacagctagttgaagagcattattaatttgttgaaagtgttccaatcgatcacgttcactaattaattcatcttcttcattttcttttagattagcttctgcaatttcattgacttggtaccgaagcatatccaatcgctgcgcccattgttgttcatttgcttgttttttatttacagcagctttgagtttagaataagcttgatattcttcttgatattttttaagtaagggctgaacctctttagccgcaaattggtcgagcattcctaaatgagtctcaggttgcattaattgttgatgttcattttgcccttgaatatcaactaatcccgcaccaatttgacgaagagttgccgtattaattagttgaccattgacccggataatattgcgaccattgcgatgaatttcacgggagacaattaagatcccatcttcatgatcaattcctagtgattcaagtagtttatcaaattcaggatcatcaggaattgcaaattgtccttgaaggcttaatttttcttctccacggcgaatgaattcctgcgatccacgaccaccagccagcaaaccaactgcatcaataataattgactttccggcaccagtttccccagttagaacagtcatttggtcagcaaaagttaaggttaagtgcttaataattgctaaattatcaattgtcaattcttgtaacaaaaattttcacctcgcctagtcgagcattgcgttaagcttttcttctaatttaattgccgcttctggagacatacaaactacaagaacattcccatcatcaccaattgttgtgaagaccgttggaaaatccatcttgcgaattaaggtagctactaccggcccattccccggatgaactgttaacgctaagaaacagtcattgcgctttaattgttccaaactgtcttgaagggtctgagctaactgattttcatgtccttgatgatgatatgctggcaaaccataacgataacccccattatccgcaggaatctttatcagttgcatttctttaatgtcacgcgaaatagtcgcttgagtaactgtcaatcccatttcacgcaggcgttcaacaagatcttcctgccgctcaatgctctcattagtaatgatttcacgaattttttgttgtcgttctgcttttttcatggattaagtcacctttatttattccttatgatttaaatcatcatcagcggttgcaataaccttatcgatatttacttcttcggcaacaatccccggattttcacttaggcggaggtgaactaaaaattccatatttccttgtccccctttgattggtgaataatctaatccaaggatatcaaaatgatcttcacgggcaaaggtcagcacttcttccaaaactgctctgtgaactttatgatcatgaatgatcccatttttgccaacatgctcttttcctgcttcgaattgtggtttaattagggccactacttcaccacccattttcagtatctgagccaaaggtggcaagatcaaacgaagggaaataaacgaaacatcaatcgaagcaaattctggttgaccactagtaaaatctgctaacttactgtaacgaaaattggtctgctccataacaactacccggggatcttcccgcaattgccaaaccaactgattagtcccgacatcaagagcgtaacttaacttcgccccattttgtaacattacatcagtaaagccaccagttgatgatccaatgtctaaaaccgtcttgtccttaactgaaatatcaaaaacttttaatgctttcgctaatttcaagccgccccgactaacatatggcattttatggcctttcatgtgaagggtggtggtaatcggaattttttgtcccggtttatctaatcgttcattatttttgccaagaatttctcctgccattaccgcccgctttgcttgttcgcgagagtcaaacagcccttgttggaccaataatacatctacacgttcttttttcataatccctttccttatttaaaatatgctaaaaagtcatcataaccagcaaatgacttgccagtaagcttttcaagattcttttgattttgattagcagcagttaaagctatctgtagctgctcctttgcaccatctatgccaagtaatcctggataagtatttttttgctcatcagcatctttgtgaacagcttttcccatctcttcagtagtactgaggacatccattaaatcatcatagatttgaaatgctaaaccgtagttttcaccaaatgctgctagctcttgtttgatttcagcagattgatccatcataatcccacctgccaaaacagcatagcgaatcaattcccccgttttttgacggtgcaagtatttcaattggtttaaatttaaatgttggtgttcgccttcaatatcccgtgcttggcccgcaaccattccagatggtcccgcggcttttgcaagttcaagggtcaactgactccgaacattagctggaagatggttatcggcaacccactgaaaggccaatgtcaataatccatctcctgctaaagttgccattcctgctccaaatttacagtgattagttggttttccgcggcgtagatcatcattatccattgctggaaggtcatcgtgaattaatgaatatgtatgaagcaattccaacgcagaagctgcgcgtagcagatcatcattaagcgtgccacccaacatctcaatcgttgtaagcgtcaatgctggacgcagccgcttgcccccagccattagggaataagccattgagctttctaacgttgcttgatcaatatctgtggccaatgacttgcttagataatcttcaatctgttcttttaaaatcggcaatggtgtactcatctttttctgctccgttgcttattgttcatcagtgctaccaaatccacggttaccaccgccattattgcttgggtcatcggtttgtttttcgtagacttgctcatcaccattatcgtcaattaagtgcccaagcgttttttcagcatttgttagcttcgtttgtaattccttagaaagcttgattccttcttgaaactgttgaagggcctcttctagtggcacattcccctgttcaaggtgattaacgatctgttgtaattgtgctaattgttcttcaaatgttggttttgctgttgccatcttagtgctcctttaccttttttatttctgcttgaacttccccgtcatcaaaatgcaggtgaacattttgcccaaccgttaattgactggcatgattaacaactttttcatcactcgttacatatgtataccccgactcataattttaagggggctcagtgaatctaattgtttaataagagttgtcacttgttgtttcttttcattttggttggcaagtgaggctgtcaccaattgtttttgtaattgattaactaactgttcttgttgttgaacccgatgcagtggagaaatagccgttagacgcccacttaatctttctacgttcattcgcagctcttgcattttattttgtgctgcttgacctagctgttgagttaattggtcaaccttttgtgcatagttttcatataatcttgtcggttgctgaaaaatatagctttgcagctgtttattcaattgttggcggtcaaaattaattttagtccgcatcgtatttaataaacgattctgatcatctttaagtgtcattaatacatcgtttaattttaccggcgttgctaattcagcagcagcagttggggttgctgcgcgttgatcagctacgaggtcggcaattgttgtatctgtctcgtgaccaactgatgaaattaccggaattttactattggcaattgcacgggcaactacttcttcattaaaaggccataagtcttccattgatcccccaccacgaccgataataagggtatcaaagtcgccgcggtcattggcacggttaatttgtctagcaatatccgccgctgctttatccccttggacgacagtgggatatagaacaacttgagcaattggataacgtcgtcgaacagtcgtattaatatcccggataaccgccccatcaatactagtaacaactgcaattcgtttcggaaacattggaatctgttttttaggtaaattaaatagaccttcagcgctcaatttcttttttagttgttcaaacgctaagtataaagagcctagaccatctggctccatccgatcaatataaatctgatagcgaccacttttttcatataaacttacatgaccgactacacaaactttcatcccctgttcaggagtaaatttaattttccggaattgatgctcaaacattacagcatcgatcacagcattatcgtcttttaaactaaaatactgatgcttttgccgtaaacgaaaattagaaagctcaccggttaaataaaccgtatgtaggtatggatcccggtcaaacttcattttcaaatacttagttagttcactaactgttaaatactggcttctatccatgatgcctccaccgcgctaaatcaactgtttgttccattaaagttgcaattgtcattggtcctacgccacctggaacaggagtgattgcctgagcttttgtctttaccgcttcaaaatcaacatcccctgtcaatttaccattgcttaaacgattaattcccacatcaattaccactgctcctggttttacatctgtctccttgataaggttaggcacaccagtagcaacaattaaaatatccgctgttttcgttaaagcagaaaggtcgccagtacttcttccagccattgttacagttgcgttagcattatttaaaagagctaaaagaggtttaccaactaaaatactccgaccaacgataactgcatttttcccttgtaaatcaatattatattctgccaacatccgcataattccgcgaggtgtacaggccactggataattaccatgttgattggcaaacagttttcctaagtttaggggattaaggccatcaacatccttagttggcaatatagcattggtaattacttctgaatccaattgaggaggaaggggttgttgaacaagaatggcatcaattgtgtcatcatgattcagcttttcaatttcggcaagaagctcatcttgactaacatcagcaggaaatttttttaaaattgaattgattcctaacctagtagccttattatgcttatttcgggtatagattaagctcgctgcatcatcaccagcaatcacgactgcaattcccggagttatattttgtttttcttttaactgtgccaccagtttttgggtctgggcattgatttttttagcaagggtcttgccatcaataattgtcgtcacagtgattcctcctcgttaaatttccattttatattctaccataataatattgcgcttaagcaaaaaaggagtggaatcagaagtttatcacttcatttttccaccccataattattgttaacagtaatattagttattcgtgttgacttgtttttcaaatttgccaagggctccattgataaatttacgtgacttatcactgctgaatgttttcgtaagttctagtgcttcattaattgctactactgttggaacattttcagcatattgaatttcaaataaagcaagccgtaaaataactaaatccggctttgctaaacgattgatggtccatctgcttgcgagaaggtcattgatttgttcgtcgagctgatcttgatgttctcgcaccccatttactaaagtcagtaaataagggggaatttgcttttcatcatgatgaggaattgcctcatacacagtttgaatatcggcttcaggatctgattgcaaagcaaagagaacttgaaaagcctcctcacgaatcatgtgtcggtttaaactcattttattcaccagcctcgtcattaagatgttcgccaaacaagtcattagggtctacttgttggtcttctttagatgttacgattcccttaatatgaacattaacttcttttacttttaaatcagtcattaatgtgatttgttgtttgaccttatcttgaatcattgccgctactttaggaacagagacaccatattcaacataaacatccacatcaagtgataatttttcatcattgctggaaagctttaccccacgccggcgatcagagcgtcccaaaagttcacttacgctatttgcaaatgaaccatacatctttgaaacaccatcgatttcacttgcggcaatccccgcaataatttctaaaactcgtggcgaaatttgaattgtcccgagtgacttgtcttcactacttaaaacaatctttgattcttcagccatcgtcagccctccaatttatttcttctcttaattatagtaatcatttctattctgcactatgttcgaacaaattgcaacaacttggtcaattaggaacatagcgccagtttagaaattaaccgcaaattatgattataccaatcatgaacgactaaatcgagactagatgtggtaaattgtccgaaattaattgatttaaattcttctaacgttttcaagaattggtctgcctgctgaagcggactagtataccgtgcaaccgtcacatgtcctgagattgttggatatcgttcttttagcaataagtcatgtaacggcagttctttcctaagtacattccgtaaagttgataattctgctgaataatacccttttacaagaagtgctcctgaactagtgatcattcctgctaaacgccaatgaatcggtccaatttgtgaaataatctgccctactacgtttttatatttttcctcttcaaatgttgagagcgaaaagtatgaactagctgcaataaggtcaataatcgtaatatgcaggtcagcaggaggatagaagtattggttaggctcaattgcagccaacttttgcaagcaaaacataatgttccgactaacgtgcgcaggcagtgaagcagtaagcgtcagtcctcgacgcatatctttatcaggatttagcaagttacgatctagctgttcttgatgatttctaattgccgacattccctgttgattaatattattatacagagtagtaagttgcatactattttcctacgattattagatcagttggcgcctttgtcagcacttcaactccaccgtgagtaaccagaatatcatcttctatccggaccccgccgatttcaggaatatagataccaggttcaacagtgataacttcattgttccgcaatttaatattttgagcactgggtccatagctagcaggcaattcatgaaccgataagcctattccatgccccattccatggttgaattcatccccataacctgctatttcaattaattgccgtcccgcaaagtcaagttggtctcctcgttgcccaacatgagcagcttgaattacagcttcacgggcctcattgacgatttgataaacatcacgtaattctggatcaattgaaccaacggcaaatgttctggtcatgtctgccgtatagccattgaagtagtagccaaaatcaacagtaacaatatcgccgtcttcaatcaccttttttgaagccgtcgcatgcggtttggccgcatttttgccactagcgataattgtcggaaaagaggccccgcttgctccatgttctttcatccaaaaatcaagcaagttcgcaacatggcgctcggtcatcccagcgtggacattttctaaaagataccggtatcccgctgaatgcaagtctgcagaagcacgcagggtatttacttcatcactatccttaatcattcgcatccgttcaatttgttggtggaaaggaacaaggtctgtcgccatctgctcatcaagcatatcaaataaggcataagtaactgtatcttcatatcccagaacattcactttcatcccctgacatattttattaagcgaaccgtaatagtcacgggtaatcattcccacaacctcatcgttttcaaattcttctaatgcaagctggtaccggtcatcagtaataataattgcattatcttttgttattaaaaggcatccatcgccttcaataagattaaagccagtgaggtaataaatgtttttttcatccgttactaaaaatgcatcgatatataatttttcaaatttcttctgtagacgtttaattctagacatagtacatttcctttaatactgccggttagagtaatcacgagggccaaagatagccgtcccaacccgcacacaggttgacccttcttctaccgctatttcataatcatgggtcatccccatactaagaacatctaattttaattgatcattttggttgttcatttcatcgcgcaattcacgtaggcggcgaaaaatcggccgcgttttttccggatcatcataataaggagcgcttgtcattaatccccgtaactttacatgtggcaattgaagactggccttagctaattccatgcaatcttgcaaagttggcttaaccccaaatttactctcttcttctccaacattaacttcaattaaaatcgggattattcgattatgctttcttccttctttttcaatcgccttcattagcttaagggaatcaactgattgaatcattgtaacgtaatcagcaatgtatttaaccttattacgctgaaggtggccaatcatataccagttaatgtcggctggtaattcatcatgctttttatctaattcttgaacataattttcaccgaaactgttccatccagctttataaagctctgcaatatctgccgccggatgatttttgctaaccggtaacagttgaacatcttgaggatcgcgaccgctgcgcttacatgcagcaataattttttcttggacatctttagctttatcaacaatcgtcattaaacagtttgctcccttcaattgtgggttaactatattcttacattatagattaacatataattgaaaaatatttaaaaataaaaagactactatttcatgtagaaaagtagtctttttattactattcagcgattgggtaaaccgataccttacgcttactgcgacccatgcgttcaaatttaacaacaccggctaccttagcgtataatgtatcgtctccaccacgacccacgttttcacctgggttgatgtgagtaccacgttgacggtagatgattgatccagcagttacgattgaaccatcagcagccttagtaccaagacgacgaccagctgagttccgaccgttagcagtggaaccacccccttgtggtgggagaagaattgtaaattcataatcatagttgttcacctccagcaatgaactttaatcaaacatttttacttcaatgttttgtggatagctttcttggatatcacataatccatttaaaaaggttttaagaaggatctgactatcatgaccaaggtctaatcctgtaacttccagaaagccaccattatcattatcttgtttaaggtgaggctttgtatgaacaacttgttcaaggccgttcaccgttgaaatagataatgcagaaaccgcggcacaaacaatatcttgcccatatggaccagattcagcatgcccagtcattttaaaagaagtgatccgctgattcgaatctaaattaaactgtgctcgaatcatgatctcacctccgcattaagcgttgatcttgttgatagtaaccttagtgtaaggttgacggtgaccttgcttagtgtgagtgtgcttcttaggcttgtacttaaaggtaacaaccttcttttccttaccttgcttgtcaacagtaccttcaacagaagcaccgtcaactacaggagtaccgatcttagtgtcgtctccaccgacaaagataacttgatcaaaagttaccttgtcaccttccttagcatcaagcttttcaacatagatagaagcaccttcttctaccttgtattgcttaccaccagtaacgataattgcgtacatactttgtgcacctccttaatatctcagactcgccgtactaagcagctaaataagctttagacttaataacgcgcggttgtagttgttggttcacaaatacaacgtttgtataatatcaaatattattctcttcgtcaaccgtaatctctacttttataacgaaaaaaggactgtgacataagttaagttactttcataaaaaggaaatacgcagtacaacaatggaggctgggaaaaaactcctagtccaaaataaaaaccggatgatgaattttttgaacaattcatcatccggtttttatgtacacaggaaatcgttcctgatatgatgtaattacccctaaaaacaaccaaagggagcgatttccatgtatcaaaattataccataggacaaaccgaattcgtactaaactataactatgatttaccacaaaatcatattgcgcggctaattagtgattttgtcgactcgattccacaaaatgtgctattagaagattcaggagcggctaccggccgcccttcatcgcatccagcaattatgcttaagattctcttgtttgcctactcacgtcaaacttattctggaagaaagattgaaatgatgttggataagaacctgccaatgcgttggttagcccatgattatacttatagctaccataccatcaataactttcgacgcagtcagcacgctagtaagctaattaaacatgcctttgtctactttaccatggctttgaaagatcacggactaattcaaaatgatgcagtttttatcgatgggaccaaggtagaagccgatgccaataaatattcatttacttggcggcgggcggttgaaaagtatcacgctaagttaagagaaaagacgagtaagctttatggggaactagtagaaaaacaagtggtgcaagaaatggcacccgagctggttacttctgccgaaggcatggaagtaatgaaacaagagcttgcggagaaaatcattaagttagatgaagagattaagcaagaaccaaaaatcatcaaaggtggttcagttagaaaacggcgccgtcgttttctaaaaaacttcgccatcaattaagcaacgacctaattccgcgtgccaaaaagtatgaacgtaccgaagatatcttccaaggtcgtaatagctatttcaagactgatcatgatgcgacttttatgtgtatgaaggaagatccgatgatgaatcgggagttgaagcccggctataacctgcaaatcgctacacataagcaatttgtccttgattacgggctcttttcaaatccaactgacaccaggaccttagtgccatttcttacccagtttcatgctttagatttctttaagcatatcgttgccgatgccggttatggtagtgagtacaattacacaatgattcttgatcagtttgaaaagcagcctgttattccatacacaacttatcaaaaggaacagaaacataaatttaaaaacgatccaactaaatcacaaaattggcagtataatgccgaagatgattactacatcgatcatttaggagttcgctttagcttttatcgttatagtaggcgaaccgataaatatggtttcgaacgtgatttcaaactctatcgagcggataagcaccaactgtcagaacaattggatgagttggcaaaaacaccaagtggtcggcaacactatatgcaggttaacccaacgtggaattattacaaggctaaagtaaaagcaaccctctcaagtgacgaaggcaagacaatttatcgtcgacagaagttcgacgttgagccagtctttgatcacatgaagagggattttggcatatgccgaactcatctacgcggacaacgagctgtggaaaatgacattgggctagccctggtggcattaaatctaacgaaattgggacaatcaattagtcgattggcgactaatttcataaataatttaaaatccgaactacgatttttggatcgatcaaaaatcatagtccggattttactgttagagaaccaagaattaatagttaattcccagcctcctattgttgcttgcgggggctcaaaaacgaagtcacgagtgacttctgtctcgctccctcttcctacgattagtcaagaaaaatatttagaaaagaagagtatactaaaccaacccggttcttcttcaaaaatcgagaattagtggtatattaaaattgtgaggtggttatgccttcacagggactattgagtccgtataccgatagtggtattttttatggtgcttaatcatggataagagacatttcagagttttattcatacaagctaccatggcgaccttgttcagttttggacgaggtcgtttttcttttaaacgatagtaatagtcaacaatatgattagaattagcgtgttgttggcggatcatattacctacagtaaaatataagagcttacgggcaatcgggtttccacgcttattaatatgatcttgacctaaataggttccagattggtaacgacgaatatcaattccaacaaaggcattaagctgattagcattgtcaaagcgactaatgtcgcccaattctcccattaactgagccgcagtttgtttcccaattcccggaaaagagcagtataggatatactctggtaagcgctgggcaatagattccatccgcttgatgacctcttcctttttacgggttaaggcaattaattggcgagcgtagtagcgaacttcatcaacctgaatggtatcaccagaaacagccggatatgatttttgggcgagatcgattaatcgatcggcatacttataagctttcatcttagatattcgtttatctgtagaggccattagaatattctttaatttaactctcgaataaggcctaactagtgctggatgaggaaaaagctccacgatattcaacgctaatttagatgttctatttacaaataattgcttaagttctggaaaaacttgttcaagtgcagtatgaagatgatttagacgatagttccaatcagcattgagctgattataaaaccgactaagctcatgtaactgaagatagtcttttttccaaggaactgttaatcgaaaagcattttcctggacagtgagcgcaatccgatgagcgtctttctgatcggtcttaactcgtcgtagactctcggactttaaatgaagttctagtggattaagacggcaaaagcggagaccattagtctcacagaaatgtccaattactcgcgaataaattccagtcgcttcaaagtagataattggcttctgagcttttttaatcatatctcgtagagcattaaaccccgctttcgtgtgtactaaagaaaactcctttaaacagtgtttccctcgataccagacacagtagcttttcctcattgaaacatccaaggcaaatatatcagacataaaaagacttcctttttataaatagagctagatataaccgctatcctagatttgtacttcatttcctaaatactcgaactcgtagttccacaacctaaaagcaaaatatcaaatcaaagatagcggagatcattttataatacggactcgaagtccctgggagcatgatcgatcttagctctatcttcagaataacaaaaaagtccaggacaataattatttttgtcctgaactaatcttaggttgtttgtagtagctattaaatcttttctaaagttccttctagttcaccatcaaaaaaactaaccaaagaaatattctcgctactaaactgattcaacatttttgccacgctttgtgtcatataacgtggagtataaatcatgccatcttctagccaccgacttactaagcccagaaatgctgaatcaacaaaggaaatctgcaaattaagtgggaccttcaactgttggttcttattcacttgctcattaaagtgtgtcatttcatttgctaaccgattgtaaagttgttcataaaagaagttattcttttcattatttaatagaacatcaaaaatatcggcgttattttcgatatactgaaacgctttgcggagtgaaaacacctttaccgtccgttctttcgaaaaattactatcgatcattacttggttaaagaaatcgtcaataatctcttggattgctgactgaataaaatcttgtttatccttatagtgaagatagaaagttccccgagtgatgttggcagtttcagtaatcttttggacgctaatatcttcaagcttttcacgtctcatcagatatacaagagctttgcgcagactattacgtgttttaattacacgtgggtctgtcttattagcagccatttaatcatcatccttccatcatacagcttaagtcctttctactttcgtacttctactgttttaaagtatagttgtcatgaaagcggtttgtcaacgaaagtgcagattttatcttaacaaaataattatattagattattaccattgacaactttgtagtgaaaattatatacttaaatctgtttggagcggtagctcaactggatagagcatcggtcttctaaaccgagggttgcgagttcaagtctcgctcgctccatataaacgttatttacaaaaagaggatagagaaacgtttttgtttcctatcctctttttcagttactctcatctaaacttacagataattttctaatttttcactttcattttttaagtatttcttaaatgcactctcatatgttacaattttgttgcaaaaatgaacatttttcataataatgaatatagagattgctttttgaggtgattattatgctaccatttcttattattgttttaattttggttgcgtcggtaattggtgaatttatgtttggcagtcttagtaaccaagaaactggaaaacatagtgcaactaccaatcgcttacgagatcgaaaagcttaatcttatattccgttcaacacaagaggccgaggaaattcctcggcctcttgtgttttatcttaatgttggtcaatcattgcttggtaagcatcggaaatttgatcaggtgttaactgccaatcactaattcccatttttagcaaaagatgccaagcatgccgaaagctttcttgttgatgattaaaataggcatcacttaagaagtgtttaattgctagatacgatttattaaggtctgctaactttgtagatcttcttgcatctgtaattcgttgccaggcttgattatctagcacaaccagatgcgtccacttcatctttgcactatacaacaaaagtaaagctactgattcaacatacgattttagcaaatcttctttgtctactttactaggattaactaccttataccaccctgctgcttcagccatatttgataaagaaatgtcaaggtcaacaaaaatcgtttgctttcttgtttctggcccaatcattaattccttttcatcatcaatctttaattctaaatcgataatttggtgaagcattttagtaatatctaacattgctatgcctccacaataaaatctactgcttattcttcctcattagaagttggatcttctgatggttctgccgaagatacttcatctaaagattcgtcttctgctacttctgtcgttgctggtgattcttcatcaacaatctccatatgatctgttctcacggctagagcggaacggtttgccaaataccactcgcgaaccaggtcgtaatgaagcaatacatcaaagaacgaaacttgctcatccgaatctttaactaagaaggcccactcttgactataatcgtccgggtcaaaagcaatgtcaagtttggtaccttgatctaatagtaactcagccccattatttcgtggtaaattcatcaacatgtaatcttcatcagcagtcgcaacaaataaacgatcaattactgtcagtggaagttcaggcttattcaacataaagcggcgatcatttgcagttgctaaaatgcctagatcaatcgtgaaatcaagatctttttgcaagtatttagcaaaatcaatcagaggtttaaccgcatcccgtaactcaaggtcagtatgctgtttaagcgcataaacgataaaataatttactaatgcgcggttattaaattgcattaatttatcttctaagcttagatagaaaagtggttcatgctgactttgctctgtaaaagccgcttctccccgactatcgacctcaaatttaaaaatagcttcaccgccaatagccgcaacagtcgcttcaaattcatggtttaattcattttctgcaacattaactgctgtatctccatgcatttttaataggtgatccataaaaatcagataatagtcagccgccttatagtgtggcggaaaattaataaacgcgtttgccaaatccattttggttagtttattagcggctgataatagattcttagcatccttagtctgggctaactggtctaaaaggtcaacatatttttgtccaaggcttaaaacatctttaaaggaatcagaaagagcctggacccgttcactaggagaagtcacgattcgattattgctcatcgtcgtccacctgctttccttctgatccatttaaactggctaaataattagcatataaattgcgattagctaattcgaaatcttcaaagctgccaaaagtatcgataatgctcttttgctcataacttaaaatcgtattttcttttgataaggataggacaacgcgttcattatccttaatagtttgggctgcattacgagcttcttcttcttggtcctctaacttttgcagctgctcaaccagttcctggcgactctccttgttacgacttgattcccaaatgccagatcgtgaactaatttcttttaattgttcttgaagggcttctttacgttcctcacgttctcgttgatgatcaatcaaatcttggagacggtcattttcactagagattttactaatccggtcactattgtaacgtttattgtcacgcgctaattcaaaagccgtccgtaatttatcatattctgtttggtcaaaagaaaaacgaacattcaaaacgtctaattcaccaaattgacggcgattccaccagttaccaaaataaatccggtagtgaccagtttgatattcttcataataaaagaagggataggttttacccaaatatttaattaagttttcactaaggtaattacttaattgatcagccaaatcatcgactaggttcattacacctttatcatttggttgttgttcccgatgttcaatctctttagcatagcgttggttatctagtaattggtagatttcccgatcacgatggtttgaaattgcatcattaaagcgtcgcaaatactttatctttgtaataatttgttgattgatgacttgagtaacatcaagtgaatcactattagtttctacactcgccataagcatgctccttgtctaaataactacctattataataaataactttactaccttttttccactctttttaaatttttttcaaaaactttatatttttagcacagatctgttttttgaaggtaaaaataaaagactttccataatgaaaagcctttattcccttatccaattattcaaatatcaatgaacccctaacgataatttagcaaaacggctcatccgatcaatcgtccaagctggttcccagacaaattccacatcaacgttttttacctctggaacctcttttaccgctttagtcaccatatcagccaatacatttgttaatgggcatcccattgtcgttagcgtcatttcaatcaaacatattccatcattatcgagatcaattgtataaacgagtcccaaattaacaatatcgatatgaagttcaggatcaataactgttgctaatcgttgaacaatatcgtccttaattgattgtttgtctctcataattaattatttttccaatacttctcaataaattgttgtcggccaccagcttcttctaaggcaaaacgctgcggatctttcttataaaagccctgatgatagtcttctgcgggatagaatggctgcgcatcctcaattgttgttacaatctttgcatcaccaaaacggccgctttcctgtaaagccttttttgactcttctgcagttttacgttgttcatcatttttaacgaaaattacaggacgataattgtctccccgatcttggaattggccacttgcatcagtcggatcagtttggtgccaataaatctctactaagtctttgtatgaaattttatcggggtcaaaagtaatctttactgcttctgtatggcctgtcgttccagaacatacctgctcataggttgggttggcaacatggccacccgtataacctgattcaactttgtcaattcccggataagtatcaaacggctgaaccatgcaccaaaaacatccgccggcaaatatcgctgtatctaaactcatatatatcaatcctttccttgattcctcaacgtttatagacgttatgttttttgactaaataccgagatttaatgagaaatatcgagaaacctagaatattttttcccatgattttcccatgggaaaatcattcaattcacaaagtttctctaacttattacttaagtataacccaatatatcaatttagattagttatctatagtgtttactaaattggtattcattcatcgccgcatttctttatgatcatttcgaaaaagaggttttagttttacagttttcggatttaaagctttttgttcgttaatatgtttatgataaatttgctcattatcatttggaagaagttctagcatttttgaaaaagccttactttcggtactaggatctgttgctccataatatcgcattaagttaattgtaaattcagcacgatcaagttcattaaaaggtaggactaaataattttctttctcccaaacattataggctgcatttgcagcaattaacgctgtccgcttattaccatcttgaaaaggttgtaattttgctaactttgcaaatacgagccatgcatcctgtttagtttgcgcagaatgcttaaactcatcaataatcttttgtaaatcagctttataaactacttcgggaggaaaataatgatcttttccagctgtatcaattgtaattgcaatattatcatctggattatacattgaatttcttaaatgaccaggaatagccggatcctcttccttactatatacaaaagatttattgatattaataattccatcaactgtaaaaccatctttttttactgctttaattccagctaaagcatctttaaagattggtacatcctcattatcttgttccaaagcattagtatttcctgtatctaaagccttttttgtctgagcaactgtgcttccataaccattcaaactcccaaatgaggcaataaattgagctaaagctgtattatttgccataactatgctcccttctttcactattatctaataatacacgatcactttttagtttttcttactttcttcgctgagcagcaattttataaatgcgttcccaccattctttatcagactgatttttacattcattaatcttttttcttaattcatctagaggaactttaagaagccaatttttgattaatctagttgaatcagaatttaaattcattgtaccaatccctactttattttcctgaaaaaattctaacaatttatatcaacctataagtttcaacataagtaatatttaacacttatattgaaaagtaaaaatatattcagctaaaaattactattctaactatataaacttcataaactcaagtttatgaagtttatattttataattaaaatttaagtttcaaatcttcgactatttatcatctaaatctgtactgatcattgataaatcaatattagatgaatcagataaatcagcgttcatttgtgattcttgactttcctgcttgttagtttctttagtctgaaaactatcttgtttgcttaactctttcggattattaaagaaagactgctctaaagcgctaattatttcaccctgtgaaaaagataaggcgcaaggaaaatcagtaattccgaacataccaatgactaaaaagattaattgattcactgattcgctaggagccgtctgtgcttcaaaccaagcgctaacttcactatagtccggtattctaattgttttagtcttggtttcaaattttccattttggatattgtcgcttttttgtccattttttaaattactattattaaatttcatttgttgatttgctcgtattttagggagtgtagaaggtaaatctacttccccatacaatgcagtaataaatacaatggattggccaatagatgaaccaagcgagttttgaatatccatccattcttttactggtccttcaatgtacaattgtaaattacgtgctttagtaactgctcctctcggcatatgcttcgctcccattcattatatatacatatcattataacaggattttgtaatctatatcattctttaggacccattaatgctttcaaaattaaaactaagcccatcctatttaatacctgagcatatgatccatcgacccaaacaattggaattatttgatctccattgaaactcataaatttattgttaagtttctcataaagccgagtagttttcattggtactgcagccccaccgaacacaaacccaatcttaatacttgttccaatcttccgtagtgtttgagaagcattacttacaatctcatcagcaaaaggctctgctgctgaacttactactttaataactttttctttactgcctggcgcaaatggattttcatcctcattaagatatttttgtaattgacgaatattatcaaatccataattcttagtttgtaagtaatcaaccgaacgttgaaggacattatcgtatcctcgcataatagaattcgaagccatgatatttggctttccattagtaattactgtacagtcacttgttttaccaccaaggtcaaaacctatcgcatctttaatatttttaatgaattgattattaattttatctgctactttaggatacttttctttaagagaattaatgatgctattagccaattcaggataagcatttggcgaatttttaatcgccgcaaaagcaacttctccctccaatcctacaaaaacatttttgaactgcagcgatacactaattggatttttaaagttgtgaaatgtaacaatatgcgtattatccatatatcttttacgatagtttcttaaaacattaggttgttttgcctcactgattggtaatgcagttgtcatatacacgtccatttttaactgattatctaaatcttctccttttttataagcatcctggactcttttgccggctaaattgcttaatgtaagtaacaaagtaaggtcaacttcagattttcctgataagtcattgtaatcaaaatgcgttaacggcattgtactatctaaagctgcttgaccgactaaaaatcgtcctgcttcactaattgaactactagtaatagagacatccatatggtttaagaaatcgtccatataagcatctttttctgcttctgagctaaattcaacgggagcagttacatctaaggaatctttcatagcaattactgaaggacattctatatcttctccagcactaaaaatttgttttgcagtttctgtaccatcactagtaaagagagttcctttcaacgagtcatttcctgcatcatttgcaaaataaagtttataagtcatttgattacctccaaaatatattcgctacatagatgtcatattgaaacttatttgttacttatattcgctaactaaattataaatttcaatatatataacaattaacacttatatattaattctttttgttttaagtgtcaataactagacaaaataacatataagcaaaaagatttgatataactagagtaactttaatttcaattaagtgaagttctgccatcaagggactaatcttatttggagataataaaaaagacgatagttattctaccgccttaatttcacatttatatcatttatagcctataagataaccttgtccaaatttagacaatgttcatttactacattaagcttgccattatcatcaatcctaatgtactagtattaaaagtaatatgcgcaataatattcatttccagattactgaagtgtaaataaataaattgaaaatataagctcaataaaatgtagataatcccaattgaggctccgtgcatttgcgcaaacactgttgcaactataaatgcactaattccaactctcaattttgaattatcaacccaagatgctaaccaagcatcgacacgatggaaaaaactcttccgaaagacaatttcttccaaaataggtgcaattatcactacgtaagctacatagattatatttttttgaagtaattttacaatcaatgatgtatttgaattaccaattatatgattattaaactgtattacaattagtaaaaatataagttcaaccattaatggtaatagccctaagcctagtgcttccacaaaatttttccaggaaagccggcgaattttaggacgcagccataatagataggatattaataataaagtaaagctaccagctagcaaatatgaaccttcaattcccgtaactatgccagcatatagccaaattagcacataaccaaatatgattacccattcattaaattttaggctttgtcctttaagccataaagcatattttcttatttttgctgtcatattcatcaccactcactaattaacaactgttccaattgtcccaatccgttgaatttgaatcaattttctttgattaccatcaaatttcactaagtaaatatcggttgttttagaagaactatgagaacctttacgtgaagaatatgatacttcaacaatcccactaacaatttgcttttgatctataccactcacataagcattgcttccatcataagatgaagtaatttgttctgcatcaattatgctatgaccagttttatcaaggccattattgaacaacttcttatcatttagcactgaactagttgcaattccatgtactctattcttacgtttaatataagtattttgactatcataagtaaaatactcaataaagaactttttagtaattgcttgtaaatcttggctagcttcataagcttgggtattttcagatttagttttgttagaacttactaaattctcattaagaacactctgacgggctattttttgtctttcttttaagacctttttacgttgatttaacatttgcttgacattcgctgtttctttattgtattgaatctgctgtagcttaaatgttcctaaacaaattagactgacaatgattactatcaagcctataactgaggatattttcttacccatattaatcaccgccctcaacgttcataacttgcttagtcactggtttaattttttgataatttaataccttctcattttgtagatcataattcattttaattagataaacggcagattgattatccatagttttaaagctaaccaccgcagtcacaggcacctgattgttaactttaactttcccataaccaatttctacaccattattttctttgaaaagccattccttagtattaggatcgacattatatactttcaattgctcagctaacttagggcctaaatcttcttcaatttgggtcttattagcattccaatcatcatttgagtgtattcctccaacaaccttgcttaatccttcttgcagtttcttagaagctgttatttcagctgaatagtaattaaaagaatcgttaatagataatttgtttgcttcattttgttcaaccttattgatttggttgttagtaatccttaattgatctttgtaataatttaattgcttttgactcggtatgcttagaacagtagcaattacacacagaatcgcaattatccataataaaatattcggactcattttcctcatttctatcacctaattatttattccttctttaataatcttgattggatcaagccaagttccgtcatcagaatatccgctttgaactgatgaagtaattgctttcttggtaatacctaaatgtagatgcgagccacttaaagttccaattttatctccaactttaatttcatcaccttcattaactgtaatatcccctcgactgttaaacgcttcttgataaacttcattgtagccatctgaagatttaacccagacgtaccaccagccaacatcgttagcaaccttaaatactttaccgtcatgcactgctaaaattggttgaccagctcctacaatcgctgaaccaaaatcgtaaccatcatggaagtcatttccaccaccacgaatcattccggtatggccatattgttgaccattttcatatctagttgggccatctttaggaatagtcttaaatggccacccccatttaccactagccgtatcaccaccatcagtattgcacgcattattttgttgatcctgagcaaccccagtatctgcagtagcggcagcaccatttaagagactatcatttgagctaatgtttgaaccaccaaactcctgataagcccattgtgctcccggatcacgttgttggccgtattgattttcattaccagccataccctcataatcaataaaccaattccatgttgcttgatgaacatctgtcgctttccctaccgatgtttttactttggtataaccatggtttagctcgtattgcattagtttaatttcattgtcaagagtcagttcacttgggtctacgctcttaataattccaccagcaattaggcgttgattttgactccactgaaataagccattataaccaactccatttggcttccaaacatcaagtcccgattcacctattgcattaccgaccgctcctgctgcgccagcaccactaaagcccatctttttagttaaggtttcaaaaatagtctttgctgccttatactcagctgaatttttatccttccaatttccattactaataccgccagccgaaattgttgcggtatcaatactactatcacagccttcgtcgctacctactagcatcgcaataattaaggaaactgcaaataataataaagtaataactcctacaatcgaaataataatgctccaaagatgaattctagtcttccttttcaaatagaatcacctcttttataacaatggcagtaatttttcaattaaaatcagtccaacaataactgccaaaataactaataaaaattgtaattttggtacctgataattaggtacgtcgtcatcttcaattagtctttgcgcctgttgatgaacaactttattagtattttctttaaacgactttacttgatgaattgatcgtcttaataagtgttcttttgagggcttagtattctccttgtctttgttatgatgaattgccattagataccacccccataccgatccccttcttctttagtgatttgaactttaaattgaacattacgatccccgttgatattcataaggcattctgtttttttaagtttagttaatccttgtagttcatcgattgtgactgatccaccaagtgctgtctttagtcgtggcaaatcatcatctgaaatttggaaaaagaagcgaatttgaaataaagaaaacattttttgtacggcaatgatatatggatcatgcgaatttccatttataatcaaatctttaattgttggtgccgccatcgtaatagcacaaaagtttttgcgcatttgttccatcatcattgtgagaaattcaaccccataggcgaacttaggattaacaatattttcgacttcgtctagatttaagtaataccaaggaataaagtcaggatctaatcgaccttcttttaataatcgccgtagatgcataccgttttttacaatatctgcagataataacgttaaaattgagtaaatttgagcattaaatactgcttgtccttgcgctaataacccttgaatgttgaaggtcactacttgttctcgcgaaatatcagggaaacgtgtaataccgtcaaacatatcccctttctgttcctcaattgaactaaaagtattggtaatgcgactcattgattgtgacattaagctagttatatgaatctttgggtcccgttctgctttacgcttgcgttcagcagcatagattacaaaatcctgtaaagttgggtacatatcatgaggaaggccggtaattttgatattcggcatggtcttacgaggattagctacccataagttctgatcaatgtaaaagtctcctaaccactgagacaaaattgtcatatcatcaccagttgcgtcatcacaaagaaacttaaaaaagttagtaagttttgtaatgtgttgagccatcgagttaatctcatcaaccgtcccatcatcattaactactgtaggaaagacctcaaatggattaattaagttttctggtttatcaagacgaataataattcctccttgatctttagtttgatcagtatattcagacgaaacatcaaaattccgaataatcgctcctctcgagaaaacatcatcattcattttcttgagcaatgtagatttacccataccagcattaccagttacaaagaaaaatgaccgagttcggcgattatcccgttggaatggatcgaacataacttccccatttgttcgcgtatagccatagtaagagccattggggtcctccaatttcacgtgattaaatgggaagaaaccagataaattttcagcatcaataggagtcccaattggtttattccccatctcttcttcagacattgtaggaacaaagatggattcaaaatcatcaagctgctcatcagcatacctagccatatggaacattccgttctgacgaattacatcgtgaacacgcttatctaattctgctaaagttggcgcatagacaaaaattcgaaagtagattcgcttcataacttcgctttgctgagtaatcttttgcattaaccgcatttgatcattgtaattacctgcagattgaacattatctagagccttagctttcgatgaaattcgtgttgcttcttcagttgcagctttagaaatttgcttaacaatctgatcacgattttcagtccctaccgaaataacggctaaagtcgatggaccgtttgtgagattaacgccccagaacggggacattcctttagagggatatttataaattctcaagcacgttaggaagccgtctccaaattctaaataacgagcatgacgtttaagattcccctgtggttgtactcgtgctaagaagtctagatcataaccaacactttcataatgcaaaatatcttttttcttcatacctataaatacctctatcgttgcgtattaagattattaattcgtgtcaaaacttcttctttcctttttttgcttagcggttcaagaaataaagcacttcctccccaattcattgctgcattccgattattccttaaaatggtcttagtttttccaaataataataggaagaaatcttctgaaattagttgattttctaccaacatatttcttcgctgagtttgatgaatgtattttaattgcgtcatcaattgatgtttccttctaggatcggtttcttgactaatcgcaatattggtccgattgtatcgttttccccaataaatcttttgctccgtagtatcaactggaaaaggacaaatgataaatttcatatcacttaatgctgcttgtagaaaatgatagaagtcatctagcacgatattagcttctcgttgtgccatcgtacccacgcccagtcctcgaatatttagtaaatcagcatagccatcttccttttcttttaaggcaagaaagtgttcaggatcatcagtaatagctttatacgccaacaaattcatcatgggcgtataagctaatttttcactacggtaatgttctaacggatcttttccgttttctttctgtttacgactaaataaaccgctatgaattttcttttgctttgtaattgtattaattgccattactctgtcgctcctttcttatttcactaaagggcttaaattcgtagtaaccatatgatttgaaaagcttactttgccgatgagtaatcaacatccaaataacttcaaagtttcttttccctgggttagttcgaggatgtaaatccaaataaaaggctagaatcaccgaaagtactagaaagattactgactctaccccttgatctgccgggaataattggtcaagaaaaatacttggccctatcactaaggccaagcatgctatatcggtaagataaagccaccccaacttgactccttctcgtattccggctactacaccataagttttcatatgttccacctcgtttcttattgatagtaattaatcaggttttacgaacaagtttcgccaaaaaaagccttctcatttccgtattaagaaacaaaaagacttttcgttgattttatttaattgttactcatcatcaaagggatcactttcacgaccatggatatgaccactttgacttaaattaaactgccgatttttgagataactagcactacgttgttctaccccttttgaaagatgagtaacgtgttgtccaaatctttctacttttcctggtcgtgtgactgctggcggtggagtaggcgacgagtgtgtggttgtcggtgcgatattagtgtgagcagtattatcatagtaatcactatgtacgcttccttcatcatagttattctgtgggttaatatttgtacctggtgtattacggttaaaggtatcgttttgacttgagtttgtcccatagtgactgctaaattggtcattgcttacattaggattattaacttgcttgctaaaatcattattagcaatattagggtcattcggatccattgtaggtgattgattcatttggtccgcccattggctgttttgtgcatcattgatgccaacagtatttgagctaacttcatttgcattattcatttgatctgcctgctgttggaaattaccgtccgctggttcattccctaatagactatcccagttgcttaaatcctgaagaccgttattagcttcttgtgaaggtgttgatgggtcaatattagcagcagaatcagcattattaatctgatcagcttgatctgcaaaacttgcgttagcaccagttgtatctggatcatcaaagttaattccggctggttgttgatcttgatcgtcaactgcctgaccattatcaactaatccttcatttgctggattatctactgtatctggggctgcagttgagttggtattgtagctgctactgcttccttgactattgccctcataattatccgatgattgactgtttccatatgaactattgttagcttgtccatagctagatgattgaccctgactagtatttgaactattaccttggttatttgtttgaccattgctagttgaagtattagtaccgtaaccgttactttgagattgtccagtagcagtgttggtactatcaggctgtccggttgaattactgttactctgtgcagagttactactttgattttctgacaaaccagtagcggtattttgtgattgagcatcactagtactgagtcccgtattattagatgcactattattagtactattagcaaagcttcccatttgtgatgaatcagtgttgttagtatcagataaaccagtagctttatcagttccatgagattgagaactattgttggtaattccgtgagcattgctcttatttaacataccaccaagcatcgagacacttttacctgcgccacgcattgcaaatccaccaacagcaccggccattgcaccagttgccattaattgcccggcttcttcactaagtccctgagatactccggtaactcgttcaaaataagaaatcccagcaaaagaagcataaccaccagctgcatagataatcgcaatcgctagactacgctcgatccagctcaaattatctggcagcttacttggagctacattaataaagataaaataaactttaataatcaaaaccaatagtactaatgacaggaaccatccaaccactgaactaagaaaatctcgccatttttttgaactccgaacactctgtgctgcaataaacggtgctgccaaattcattaaagaaagttcaaaaatatctttagctaccctaaatgaagctacgatgagcacaattcctaaaataagagactgaccaattaagccaagccagttaacagaatatcgcgaatagtagctgttcatccatttagcaaatttatggtaatcattcttttcaatcgaatagccaccatcggtttgttcatgttcatcaactaaatggtaattcataacggtctcagcatctttatgctttttatccaatcctaatcctttcatagttggttcatccataaagtcaccaaggtccatgttctcaatatcatcatcattatctaaaacgttccagttggcaacgtttttaattttgctagaatctggcttgtactgataattcccccaatctttccgaattaacgtgcttaaatcaattacattatttttgattggttgcacagctaaatcttcactcatacctttattactagcacgattaatatctgaacgcgcgctaatagcaatatctccgaatccagggattgtactactgccaccagctacacgcatcatcattggtaagatagtcaacgtaattgaaaccatgacaatatttggcaaaattttgctccactttgaagcatgtcccattgtttgcatggctactaaaatgattgccaagactaataatgaccatccaattgccgaaacgacaacatacagaccatgcaacggagatctggggcttgataaggttccatcccagcctaataagccaaacatagcatcaaatatcttttcaaaactctcattgatatgaaaaatagtttgaactatcacattttgaaagaaaccagcaacagcatgcaaagtcccccaggataaatgaagataatttcgccaatcttcataaaagcgaattattttcccagtatcaccatctggaatactagaatacggtccaccactaaccgcttgatctaaactacttgaattgatcgctagtaatgataagcataaattcttaatcaatatccacatctattacgcccccttcttaaattgattaataaagtcaatagcattttcatataaagctgaatttccttgaaatagatcttctagttcagtgtaactattatgatttttccaataattataagtgtcctgaaataaccccattgcaacctcttttggttggacactatggactaggctataaatgttgctgctaagacttcttaagcgttcatgatcatttagttccgtatcagtaaaaattaggtcatttgaatctgcatgcgagattacatcatcattaacctcagtaggaatactatcgttaaactgagcttcaaagtctttcataaaactgccgctaactgattcctgtggattaccgcttaaatctaaaatttgtttataggcgagatcataattaattcgcttctcttttaaatctaatcgtcgatgcaaagaaacaattctgatatctgacaaggtagtttgatcgttgaattctttctgtaagaaggtatttcgatatggcatcttagtctttccatgatcaaaaatcggtttggctgaaattgaattaccacgttgatctattcgataaactgatcgtaacactaccatttcaccacccatgaattgcattaattcaggaaccgataaaatatcttgactaattaactgactattaacactagcactgtgccagtttccaacttggccattaatattttcaacagagactgtccgcttcccaattcgtttagaaatactttcagcagttgtcgttgaattggtcaaaatatataaaatattagaacagttgctttcaatggttttagcttcctgttcgttataatgaatttgtaactgttctagattttgtacgacaatatcaaacatcatattaaaacctaaacaaatcgaaattttcttagtcatatcccgaatggtcggcaattcagcaaactcatctaaaataaaatggacgcgacgaaatagctttcgcccattgctttcagccattccatataaaatattgaaggcttggtcaattgcaaacgccggtaattgattatatgttgagttattaggcggcgtgaccaagaataaagcaacaggtgcttctgaatatttaagccttgtctctgattctataagttccccagaaagttgattgcttgtcactttaagtgaaacatccttaagaatcggcttcttagtataagggtctaatttaaactttctccctaatccttgtttagcataatttttgtgaccttgaagtacaacttcttggtcaagcacatctgctgaattttttcgataattgaaactgattttaagtagaaaatcatctggcaaagtagtcttaattgcatattgaagattcccgaccttatcaattagctgtgtacgcttttccaacttatttccatgaagatcatcaaattcaacaactgcagtcttaaactgatatttcggatcagaaaattttactttaagcgttctagggaaaccaagcttagtaaaatcaagcgaattcaaagaagtcattttagcaatatcggattgctgatagattttgattccttccattgcactggagtaaatattcccagaagtttcatcaccggcaaatttactttgagcaaacgcatctaaagccatttgcctaaatttgctatagttcttttcgttgagcttttgcaatttagcaaaataaactaataatttattcttttgcgattttggctcattgtcttctggcatttctaaaagtccactatctacttcatcatcagtaggaataatatctccagatgaatttagtaaaacttctttagaacctaattctgtcatcatatgaaggacattatccatcgtgacttcagcccagttattattgcgtttagcatgatcaacaactgccaaaattaaagcatttagtaaattaatcgatgaattttgccaaaatttatctttggcattcggatctacataaatacttgaagaaaggctatttaccgcttgctgggtctcgtcatagtagccgtctttagcataatcaataatctgttgtaatgggttataactcattgaaaaatcaggattctgaatgttaagaacttcaacctcatagcctcgtttacgtaaggtctcataagacatttgataaagttcccctttggagtcattaaccaccattgaagactttttttgtgcgcgtgacaaaatatcgatcaatggcataacttccgtttcccctttaccagaacgagagataccaattaatagactattaatagttgtttgatcaattgagtaaaaacctttagctggttcaacaaatttcactttcccttttaagccaggaaaagcagataataattgtaaaagcttaggacacagataataacttgtgtaaagccctggatggtacttaataaattcagagtttggtgtaatatgtgcaactgggattccaccatagcctgggaaagaagcgccccgatctgcaatctgtggatattgccgaagtatttccttttctgtcgctaaacgatcgtttccatattgtgaatgtttagttggcttccagcgaattctcatcttaataatcatcggaaccaggatcaaactgaagaaaagttcaattccccagaaaaagccaggtgcttgatgcattactcgatagtttcctaaattactaaactcccagccggccaccactgaacgaaaagagtcttgagggataattccattgagaatctgtgctaaaaactgtccggaggctggcgaagttacccaataatacgaagcactaattccactggctaaccagcaaaccacatagctcactacaatagagtaaataagccatattccaattagaaatatcggtgatcctaaaactttctgatcctgtccgtctttacgatgacgttcacgatcataattttttgccatgacctaacttcctttcatttaaattccatcacagcataaaaaagttacagaaatgtttaagtttcgccaaaaaaagccaaccattttaccggttgactcacgttttacttctttcttgtttttaggccaacataagctccaattgcacctgctagaattaccaccccagtaacagtcaagtaaaatgctagtgaagcctctgtactaccatttggattcatatttggagcagtactaagattattagctttattttcggaactcacagcactgctactagcattagaactactatcagttttatcacttgtagttgcagtcgaattactgctagatgcagcagcaatcatattagatgtatcactagcattattcttggccatatcttgaagctcttctaatgtaattccttcaatagttgcaatcgtttctcctttagaattaagtaatgtaatttttagcggatctgtcatcaatgttttgttacttagcgcagttgagctaagattaactttaaaactgatattgtcattttttcgttgtattttcccagaatcaacagtttgatgttcctgggagccatcgctatcagcatcaatatcagttgctacaaaattaagcttttgatcatttccctttaccttatttgccggtaactcaatcttaattatctgtgaaccatcgtcattgttagttaccgtagcattaagattggtgtccttagtcttataagtatctggtgaagtaatttgaactgtattattaatatcttctgcgtgaacagcaattggagtagctgaaattcctaggcctaagatacttgtggcaagaagtgtattgagccataaacgtttaccaacagaattttgagtgatcttcttttccataccaaaaaccttcctgttattttattcaaaagtttactttgaaaaatgccggtataatcgcctcctttatccgacaccctaattaaaaaggactaatttatttctttaactttcgccaaaagaaaaagccagcacataggctgaccttagtgaaatagatttatttattggcttgagcaaccttatcagctagttgattattattagctttcattaataagctctgtgcctggctagcacggtagcgatcattcatattcaagttgttcattttttgaataacatcgtttgcctgtttcggatcattagcaatgatagccttgtccaagttatagtaagtctcagtcttgtacttatctaactcattggcattgttgctatgtaatgcagcaactgctttagaattaatttgatcttgtgatactgtacttaatctttttgccgctgcaacccgatcatgcatttgttgttgaagctgtgcaacttcttgttgatgttggtggttttgatataccgtatatccagcaacgccaactacaattaataatagggccactacaaatcctattaccatccgttttacgcccttaaccatactagcaacttgattatctactttttcttctgattcagctgttgtttgtgctgaaggactagtttgcggggtctgaatcgtcactgattgtggttggttcattttttgtaaactttgtgccaaaactaactgcataatatcattaacgtttttactattttctttgttactctgttctattcgtttattagtattttcctgttttaaaaggtcaatttcttttcgcaacgattcaatcttattatcacgagactgtaactcatgttttaagttaataacgtctttattattagcatttcttgcagcttccgaagtacttaaacgggcagtcaaatctgagattgtcttatctttttgttccagtttttcatgcggatattcgactcgactcaactcagcctgtgaacgattatgagcaataattgtttgccgtgcattcatatcttcattggtaacgttagttcgagtactatcaagttccttactgcatttctttagcaattcttgtaatacttctgtcgcgtgagcctgaacttgactagcatcttcttgagcttgaatctcataatggcgatttaattccgcttctaacttcttttcattttcgttaacttgtttttcgtgatctttccaagctcgatcatagcgatctagggccttgccattatattccttatctaattcttgttgggccatctttttctgtgttctagctgattcgtcaatttgttctaaagtcttttcataacttcttttagcctcagctttatcgacatttgcttgattatcaatttctttatttttctttgtaagggcttggttataatcattctgaatacttttttctacttcatcatgaatggttgctgcgtcattagcatgaagtttattgtattcagctaatttttcttgaatattttgtgcatagatatttctgcgacctagtagatatttttcatttgagctattgagtttattagctgcttgctctagcaccttgtttaaggtttttttcttttgatttacttgatattcaacatagcccttatgacctggttctaccggatctagaacttcaacagcaaactttggtgcttcaacgtaccctttattgcgaacgtcttcaatcgttttagtgactttttcttcaacgctatgtttctctttccgagaattatacgtatccatcttctttgcgcttggcttatcgttatgattttgaattacttgttcttttggattagacttctttatcataacggtctgtgaagtgttctccggataactattagattggtcaccttgattagagttagttgtttgtgaaaccttttgattattattcataggcactgcttcagaaaattttcctgagactggatcatatacaggcgctttacttgcactatcattttctgttttttcaatattctcaagcgctggaattgaaagagttactctacctttttgtgtatcttcttcagttggcaaaatagcaatgttatcgtcagtagttcctgtggaatcttgataagctgttttcaattcctcacaataatttatcttctcatcataatcgacatctgaattagagggatcattaaaaatttcttcaaagatactcttagtcaagttctggtagtcataatcaatactaaaattacttaaagtaataaattcatgaggattcccatccactgatccttttttccctatttttgctttttgtgttttatcaaattcccaaatggcaaaatatgaaaacgtaacaggcttagctgttgttgcagcaagagtccgtaattcatcaaataaatcttcagctgttttaaaggtagcgaatggtaaagtttgatttaatggagcgacattttcattttcttcactctcggatacctgctcaataatttttcgaatttcatcattattttctggtgcaaactcatcatcaaattctaagcgaacggtgtatggatcatccagcataaattgatttttcttttttaatttcccgaaatgtcaatttaagttagaaagaaagtagttgctcatcagtgacgtaggacatgaatacctcatatggagttcgatagcctagtgatttgcggggcaggttatttcgcttactcatcagttgggtcaccaattcatcaggaagattgcggaaatctagctgttttgttaagccgtcccggcgtaaaagaccgttgttgttttcgttcagccctcgttgattgggagcaccaacctcggcaaagtaagtgtgaaggtcaaattgattggcaatctcgcgccagccggcgaattcttttccgttgtcaaaggtaatcgatttgaagaagtgctgcgggaatttccgaagccactgacctaagtgttggttaatcgcatcagccgtcttttcgtgcacattgagtacaatttcgaccttcgattggcgttcggtcagggtcattaccgccccttggtgctttttgccttggacggtatcagcttcaaggtgtccaaattcagtggcatagtgcggaaagtccttggcacgctcgtgaatacttcgccccaattggccagccttcccgcggcgctcaatatagccattcgggtgccgcttacctcgcatgggcaaagcacggacatccaaaccgaactgcccccgttcaaacatccggtaaagagttcgccggttacaactaattgggcgctcagcgcgcccaataatggtgtcaggcgtccacccctgggcaattttgtcgttgatataagtaagttcagccagtgacaactgagtacgttttcggccacaacgttgcttattgcgcatatagtgatcttgataatcagcaattgaggcaccggtttccaggtaacgataaacgcgataaacggtttcggcgctacggttgatcatttgggccactcggtacgctttaagcttttgcacgaaagaatgggcgatgattgtcagctcgtttgtggtaagatgggtgtaagtcatttgtggtttcctttcttttgtttaggggtattcaaaagtctaccacaaatggcttttctatttttctaacttaattttacaaacggcgtttcttaaaaaatcccattatttttactccttcatcgaattaatttacattcttaaatttatctgctatttttcattacacaactttcgccaaaataaaaaaagacgccatgaatttcttcatgacgcaaagcataatggcaagcgattaagcaccaaatgattgactagtataattcttcaaaaattcaacaataacaaaggcaatcaaccctacaactagtccaacagcagccttttgccacttctttttaccagaccgtgcactttcttccccacctgatgtgtagagaattgctccccaaacaacgataaatacagcatatgctgcaagaatgaccattaggccccgtgacaatttattaagtaaacttgaggtaccaccaattggatcagcaccaagagttaactcattcattgctttggcatatgcggttgggaaattagtcattaaaaacttatccatcaaaccgaataacctccttaaaattaagatgtcatcaatgattgttgatgatcagtcatcagtttaaggaggtttttaatttatttaactttcgccaaaacttactttttctggtcagattcaataattttatcttgattattttgatctaaaaaatttgtagttggaattctttctttagcaacttggaagaattcatctagttttttaacactatctaattgccaatatttcataagtttagttgcaaattcgtttagttgcttatccgtctcttctttttgtaaatcacgcagttcacttttttccttagctaatttctttgctagttctttgatgtaattttgctttttagctgttttttcagtttctaacgttaattctttctttcgagccattaaaaattcgtctccaatttctgttatttactatctggaatcaatccaaaattgattttgcgaccgtttttattatgatgttgcaatttactacgttcaaattggtcacgaggatcataaaccttagcactaattttgtggtaggtattatcagatttattttctaattgcaaaataatcattgaaagtggcgctgttacttcattttcaattgttctttcaagcggtcttgcaccatttttaacatccgttccaatatcagctaggtactcaattaggtcattgccataagcaaattgaaagccatgttctttcaagcggtcatttaatatttgtaagtcattttgagcaatttgcttaataactggccggggaagcatattaaatacaattttatgttcaatccgatttacaaattccggacgaaaaatattagttagttccatattgactaacttcttaaatgcagtatgcctccgaatccgttgacgttcactctggtcaatttcgttcccttcaatcgttttctcacttgattggcggtcattgattagttcagctgcaatattggttgtcataatgataatgacatttctaaaatcagttgatcttccaaaccgatcccgtaattcaccagcatccaggatttgtaataggcgatcatgaactgctgaacatgctttttcaatttcatctagcaataaaatacaataaggtctgtgttttatttgatccgttaatagaatttgaaaatgatttagggaatcgcgctcactaaattcagacatatcaaacctcactaaggcgttttcgctatcaaacataaccttagctaattgcttagaaagtgctgtctttccagttccagtcgttcccaagaataaaaaggacgctaatggccgattaggtgcttgcaaccctgctttggcaattgtaatcacattagctactgattgaattgcttcctcctgtcctttaactaccttactaagtttatctttgatattacgtaaacgacttgtatcattacgcaaaacattagtaatgggaattcctttcatttcctgcagtactaatgctacttgtttaatatccacatcaaccacatgattagtagcagcaattgcgccagcttgatcaatcaagtcaattgccttatctggtaaatagcgatctgcaatataacgaactgataaatcaaccgccccagcgatcgcagaatcatcataatgaacgtgatgataatcttcatagtttttcttaattccattaagaatcttgattgatgtattccgagaaggttcttctacttttacttgttgaaaccgcctttgtaatgctggatcacgctcaatgaactttttatattcatcaattgttgttgagccaattaattgaatatctccgcgagccattgctggttttaacacatctcctaagtccatggctcctcccgtttgatcagcacccataattgtatgaatttcatcaataaaaaggatattttccccattagtttgtttaaattcattaatgatattcaacattttcattactgtatcttgttgtcccagcgctgcaatctgaagaactcgaatatgttttccttccagttgtttaccagctttatgtaaagcaattaatcgagctaatccttcaataatagctgtcttccctacaccggcttcaccaatcaagattgggttattcttagtctttcgattaagattaataatgacttgcttaatttcctggtttcgagcaacagctttatactcatctggattcttagctgccgctacggttaaatcatccgtatatctatcaatattaggtgtcttttttaattcttcagtcaattactaacaccccttactatggctgacttaataacacagcttctaacaggctatcagtcttctttagaattttttcatggttctctattccatatagatacgctttaattttgccgtgattcttctcaaaagttacaatgatctgtttagtaataaatggattatcaattaaccattcttcttgattaatttgattactaacaaaccaaaatgaactatcaagacccgccttttttaattcgctatcaagttcgtaaaatcgcaagcggcttagattactctttggccatagctgcttgctccagcctattggcgttcttattttagtatctaaaacattcaataacgcttcttcactccagcgaaatgcattgactcgtgagtactgattaattcgctctgcagtttccgctaaatattctttttctaactccatcacaattccttttccttcttagtattacaaactaaggccttcatcatcatctcggccgccaaaataatcattaatatctatatcatctgctggttgatcagtatcatcatggcctttagcctgttcagcctgctgataagactcatcaatttgcgagctgtcgcctaaatcaaccgtctcctcttctggagccgttttggttgctgtaggtttttttaactggaaatcacctttatcaggagtagttatatcgtagttattgatattaattgttgaatcaagatcctcgtcactttctggctcatactgcgaaacaagatcattcatgctagtttccgtttcattatcatctttttttacgtttcttaatttaattggtggctctgactctgattcttgctggtcattattattgcttgacgaattttccgagctggtttgagccggttgcgttgtcttaccaacttctaatactcgtaatttttcttgtagtttatcctgtaattttttagctgactctattttctcatgcaattttcgattttctgatttgagcttttcaataggttcgaaatagtcaccttttgatagataaagcatactattaatttcttttgcatctttcagcttaaagattatacaattcagttctttgataatgacctcgtctaaagttaatgcccaagtcgaatttaattgcgctgaatgcgcaaagaacttttcatattgattgtcactaactaatatctttaattgagatccactattactttcacattcaaaatctaatagcacatcattacctcaatttcttgagactttagtattcctgtaattttcatcatttttatttacctcgctttttaaaatccggtataaagccaataaattcccgtcccttatattcacttggccaagttgaccactcaaattacctttct

SEQ ID NO: 54 - DNA, 42311 bp, synthetic construct
  misc_feature 1..42311: note = Based on Lactobacillus reuteri
  source 1..42311: mol_type = other DNA
tgacggctttgtcggtgcctttcttagaaactctccagttcgaatatgcatttcctgtaataggctggtttgagccactcgaggaagaactgttaattgttctaggattgtatttaaactagcttgcagttcaccattcattcgggcttcaattaaaccaatcatggctttagccccctgcttagtccatgacttgccctgtttcttcatccggtaagtaaaagcccggtgagaactttcgactgaaccaattaaatgaatatccttaaatccgcgcatttgtggtgagaggatataccgccaatttcgctgtagatactttcttaaacgcattaggtcgtctgcttgtttttccgttaggttttgtgattcataagtatctaaaatattgttagctctgattgatcatgatgacgaacggctttaattgctcgcatggctaattcgttgtgccggcctaaagtatgttcaattttctgtaaacaatgatagcggtcgagaaagtattcaccatgtgcaccttgaggaactaggcttaatagcttagctggttcgtaacctgggccagcgtcactggccaaaaagatcgtttgaccggcaagcttataatggcggtctaaataatcacttagtcgtgcttcaagccgtccttggtgcccaacactgagaaagtcatgccgattaatgatttgattagctactcgctcataaacccgataatggtgcacaagagtcagctgacctgcttcttttttacctttaatcataaaggcatcaccctcaatagttaaatttttaggcatatggcgaggagtagcttggtgtttcttttgcttgagtttgtttagctacctgatttcctaactcatgcacggcgtgcattaccgaatcggcagtaattccgctgtcaaatacaaggttcaaaatgtcggcagtattgcgcattgtagttgtttgggcaatcttagacatcatcattaagtagtgtggcgataaacgacgacgtggtttaatttttaattgttggtctaagtaaaattcacgtttctttgtcccagcctgataataccgtcgttgaaaagtcaccgggccaaagataaaattaagcgtccgtggctgtttattgattacttgatagttcgctggagcttgggactttaagcttcgatctaagctttccaaaaagttttgcatgattacttgtcctaactccaataccccttttaaaataatctgttcagcttcaaataaactgcctgatttcaccaaattctgctcgatttctgttaaaatatccatgaggaaagacctgcctttgcttagtattcgacacactaaaggctactggtcttttctttttttgtaaataagtaaattggtctacaaaaaagatttccacgaccagatgaattattcatccaacctatgaaaatcttacactaacgaatattttaatttcaagttaagaagtatataatattgctgtataaaataggaagggagaaagaaaatatgcaacaattatcactgttaatcgttatgttagcggcgttaattattcctattattatggcgcggtttaaggtttcctcaattccgaccgccattgctgagattatcacggggattattctgggaaaaagtttcttaaatatcgttaaccccaactggaccctcaatatgatgtcgtcgatgggggttattatgttaatgtttttgtccgggatggagatcaattttgacctgttccgcaaaacgcccgggaaaaagcgtgatagtaagtcgccggtaattatggcttcacaggcatttggcctcattgttatttcttcatttgtgattgccttaattattagccgtttgcacttatttagcgatattttgttagcaacaattatttttttcaaccgtcgccctcggagttgttatcgcaacgttaaaagaaaaggatattttacaaaagccagtggggcagaccctcttattgacggcggtattaggggaagtggtcccgatgcttgcattgaccttctatgcatccattaatgggggcaatgccaaacgcttgggcttaattgtcttcctcttcttggcagcttttttcctcttgcgacggtttaagcaaccgtttatttggtttaataaaatttccaaatcaaccactcaacttgatattcggttagctttcttcttgatctttgccttagtaacaatcgccgaaacggtgggagcagaaaatatcctgggagccttcctagccgggatggtcatgaaactgcttgagcctagtgaagcaactgaagaccggttaaactcaattggttatggtttcctgattccgttcttctttatcatgacgggaccgccttgacttgaagaatttatttgctaaccaccaagcgctagccctgattccgattttggtcatcggctttttacttgctaaattgccaaccatgttcatttatcgacgcgttttaagccccgcaattcatttgcaggcagctttttagtagcgacaacgattaccttggtattaccaaccttgcaagttgcgcggaatttgcatgcaattactggtgcgcaatcggatgcctttacattggccgccgtgattatctgtatcattgcgccaatcgtcttcaattcaatgtataagcttgaaaagtctgatttgatcaagcaaaaggttaattttatcggaaccaacaccttaactgttccaatttccaacaattatataagaactgtatgacgtgcggatggtgacggacaatgaaaataacttcaagacctataatagtcaggtgaagcatttagagtatctcccgactcttgacgcggaggccctggagcagggaggctactttgattgtgatattgttgtcgttgggttcttaaatgatcataagtcagcgcgtctagctcagattgccaaagaacatggggtaaagcgggttattgccagccaaaataatccgcggttggacccgaaagatgtcagtgctcttcgggaaaaagggattgagatctttaatagtttcaatgttcaaagcagtgtcctgcgtgccttaattgaatcaccattgatcttgcggatgctgaccgatactgaagctggcctatacgaagcaaccgtccttaattcacgttatactggacgtgaactgcatacattgccatttgttaatgatattacgattagtcggattttccggaagcgcaagccaatcgatccgcatggtgatacgattatcgagtatggtgatcatatcctctttactggggaccggaaagcagccgaagaggttcgtgaagccttgcgcggcgttaattaaaatatttttcgttaatgtaattgccgtaaaagcgctattatggtaagattttaaatgaatttagaaggaggcacggattatgccattagttcatattgacttgattgaaggccggaccgatgagcagttaaaggctctcgtaaaggatgttacagcagcaatttcaaaggatgccaacgttcctgccgaacgggtgcatatcgtgttgaatgagatgcgcaaagaccgctatagtgtagctggtaagatggtcagcgacaagtaacaacaagagagtcatcgggggaggcagttcagtctttgcacggtggcttttttgtatgatctaaaatccatcaagtttcttcccattatataggtagaaactgctcgcaattagcagcgaaaggatgaatataattgagtgaacaacaatatatcatggcgattgaccagggaacgacgagctcacgggcgattatctttgaccatgacggaaataaggttgcgatcagccaacaagaatttcctcaatacttcccgcagccagggtgggttgaacatgatcccctggagatttgggatagcgttcagtcggtgatttcaaacgtaatgattaagtcccagatcaagccctataagattgcggcgattgggattactaaccaacgggaaacgacggttatttgggatcgccataccggtaagccgatttataacgcaattgtctggcaatcaaagcaaacgagcgatattgccgaacgattgattaaagatggttataaggatatgatccacaagaagactggcttagtgattgattcatattttgcggccaccaagatcaagtggatccttgaccatgtccctggtgcccgagaaaaagcggcgaagggtgacttaatgttcgggaccatcgatacttggctactatggaaattatcaggacggcgggtccacgcaacggatgtgactaacgctagccggacgatgctttttaatatccataccctcgagtgggatcaagatatccttgacttgcttgagattccgcagtcgcttctgccagaagtaaagccaagttcagcaatctacggttataccggtgattaccacttctatggtgtccagattccaattgccgggattgcgggtgaccagcaagcagctctctttggtcaagcagcctatgataaaggttcaatcaagaacacctatgggactggagccttcatcgtcatgaatacgggactaaaacccacgctttcggataacggcttgttgacgacgattgcgtacggtctggacggacaaactcattacgcgcttgaagggagtatctttgtggccggttctgccgttcaatggttgcgggatggccttaagatgtttaataaggcaagcgagtccgaacaaatggcagttgatgccaagaccactggtggcgtttatgtcgtccccgcctttacgggattgggcgcaccgtactgggatcaagaagtgcggggcgcaatgtttggccttacccggggaactgaacggggacatatcatccgtgcaaccttggaagccattgcctaccagaccaaagatgttgtcgatacgatggtcaaggacacccaattaccactaacagcactaacggttaacgggggcgcttcacggaacaacttcatgatgcagttccaggccgatatcttacaaacgccaatcaagcgggcagcaatggaagagacaaccgcgctgggagcagcctttctcgctggattggccgttgatttctgggaagaccaggatgagttacggaagctatcacggattggcgaccagtttgatccgcagatggatccgcaaaaggcagctgacttgtatcggggatggcaacgggccattgcagctgcgcagttttatgggaaagattaattaaaaacaccgctcaccattcaacaaactaatataaaaggaaaatgagagaaatgaaaatgaaaacaccggttcagatgactgatgatttggcacactttattaaggaaacccgggaagacgcggctttccctcatgaatcactctatgttgatttgttagaacagtggaaagttttaagtcgttaccagttagaatacgctgataaggaaagcaaacgcctctacaatgcctactggaactcgatgtcacactggtataagatttttgataaagagcgggagcatttattagaaccaactgccttgcccagtgaggatttaatggacttctgcgcggggctgattgaggatctcatggatcacgtccttagtttggtaccaccatcgccccattcgacgattattaaattaactgacttccgggttttgttgagtaacgagttacaaaaaattacccaacttgacctcgagattcaaggtccgattgactttgcgatgatcatggattattggaagatgttgggtgaaagttttgatcgggaaaagatcaagtaagtgaataaaaaacaggccctgtgtgacaattccagacctgttttttagtttacccacttttgcaagtagtcaatcaatactttcgcgtcctcttttgtcagtgcaaaagtattatcatggctgatattatcaaaatcaatatttgacaccagcatttgtagctcaggctcgtcagcgttctgataaatactaagctcattaacgcactcatcatcacgatcttcgccatcatatttaatatggagccacttagcttgatgatcgatttcatgtttttccacattctcacctcaaaactctcctttcattttagcacgaagctggtgggcccgggtaattactccgcgccgccattgcgaaacagctgcccggctgacactatactcatccgcaatctgccggtcactcaaatggtggttgagtttggcaatcaaatatcgttgttgaacgcgggacagtggtggtagaggtagttaagaaagtcgctattttccaggtgagcaaatggcgcggtcgctgaatggtcaaccattgtcttgccgtagtcatgatcatcttcttcgctgtcgagggtgtaattaaagaggaaactttcaagttgctgccgtcgtaaccggtccagtaagcgccagcgcattcgttgataagcaaagcacatcaagtcccgttcgttttcgacttcatctttctcttgtaagaaatcagcgtaggcctgggcaaagataatcgaagcatcttggacaaaatcatcatagtcgtcccggcgtggtgagatcccgagactcttcaatactccatggacaatcgtgatccgcttatcgctcatcagaaaagttaaaacttcagaaattttttgataattcattcttgagaacatcctttgaaaatattctcaagagctcttgagtaccgttaacttaccaaaaaatctgccgtcttagcgaacgataaaatagggcgaaagtgtcctaaaaagacgttgacagggcagatttatctcagtatcttaatattcatgttaaaagtgaaacgttttacagcgaatttgcacttttttaagatttgcttggaggagataattgtggtacgtaaaatcattgatatgagcatgctagataaattaaaaatcgatggggaggtggcaaactatctggttcagtgggataacaccttactgttaacggcttacgatcaaaatcggacgtttgtcttaactgcggacggggaacagctgcttattcgggaacggttgaaagatgtccttagtcgttttgcacagacgaacctaatttatccataaatttgcgagaatacccccacttctataagtaggggatgaatcgctctcttaaagcacgttagtgctttttcttttgttctatgatatatttagtatatatctataaaatgtggtgataacaatagaattagatagaaatcagcattcagtatacttacttaattaccatttggtaatggtggttaagtatcgtcgaaaagtaattaacgatgaaatatctgaatatcttaaacatcgttttgtagttgtgggacaagcatacggcattaatttgcaagaatggaatcatgatcaggaccacgtacatgttttgtttagagcaacgcctcatacggaaatggctaaatttttaaatgcttacaaatcgtctagctccagaatggtcaaaaaacaatttccagaaatcaagcaatatctttggaaatcagccttttggacacaaagctattgcttaattagcactggtggagcgcctttagaagttgtaaaacgatatattgaaagtcaagggagaaaataatggttctaaaagccgttaaaatgcgcatctatccaaattcagcacaacgaaatcagctctggcaaaccttcggttgtgttcgttttgtatggaatcaaatgcttaatatgcaaattgaacggcgcaagaataatccggaagctaaatttgtgaatgcctttgggatgaataatctgttgaaacaacttaaggttgagtatccttggttgaaacaagcagaatcaactgctttgcaaagtgctaatcgcaatttagccgatgcttttcaacgcttttttaaaggtcaaaataagttccctcgatttaaatccagaaaatattctcagagctacaattcaaagtacgttaatggcaatattaaagttttagattgccatcatataaagttaccaaaactcggtatcgtctattttagagctggtcgattgccaatgggtaaaattaagaatgtcactgttcgtctgaacgttgctggtcaatattacattactgttttagtggaaagcgaaaaccaaactcttcctaaaacaagtaaatatattggtggcgatttaggacttaagtcattacttaatctttcagatggatgcaaggaaccgatcaatcattttgaagacaaataccataaaaagttgtatcgttgggagaaattgcgtagtcgtcggttcttaaaggctcagcaggaaatcgcctgggatcatcataataaagtgttagttccacggcaattagatgattttaagaattatcagaaagctcgtattatggtggcgaagtatcggcaaaagattgccaaccaacggttggatcagctacaaaaattcactactaaattggttaaaaagtacgacatcattgtgttggaaaaacttaatactaagggaatgatgaagaatcaccatttagctagagcaatcgctaacgctagctggtcaaaattagtagatgtgttgcaatataagtgtgactggtacggtaaaaagcttattcaggtcaatccgtcatatactagccaaatttgtgctaattgtgggaagaataatcatcggttaggattgaataagtcggaatggttagcggtacgtgagtgggattgtccaaactgtggtaaacatttagatcgtgatattaacgctgcacaagtcatcttgcaaaaaggattagctatccgatagataaagttaggctcgggacgagccttggctaatagtcgtaacctctgcttgaaggttcgttcagaatcggtagggtaagtatgcgatgtttccagaatctcccacttcaagcattaaaccgtaggtttagctaagtgggagtagttcaatacatggttcatttgatggaagacgctagtgagctagaaagcgataagcggatagaaatgattatgaatggtcgcgagggagataaatatcatattcaaatcgccacctctgaacgtacttttcggcgaattgtaagtgctgcagatgaagttgctaaggagcaactttctctctttgaatattggatgtatcgcctcggaaaggtgaaaagggagatcttcgaacgaacctactttggtgattattgcgtttatacgaaacttcgaaagctagcactcgatctctttatccagacagttttacatatcctgaataaggcccataagaaagtatatggcgaagaaacgccagcagaacttgtaaaagaagtaaaacgggtgataaataagttttaatgtaaaaaatatcacaaaaatgcacaataaataaacattagtccattagcttattataataggtggtgaagaggagtagcttaagtaatagaatggagcatttttatgactgaaaagaaagatgagtgtggcgtaaaatacacactagatgttttagaagatcgctggcaaccacggattatcttttggttaggctttcggccatttaccattgagggattacatcaattgctacctgagttgacagatgttgcttttaaggaagaaataacatccttgcagaacttgcgaattgttaatccagttgttgatgaagaaaacaagtattcattgaccgatgatgggaatgacttacgtaacatggtcctaaccatgagtgtctggggtcggcaacaaatggatgactctgctaaccgagcttccacgcagattgttgagccggaaaaagataccagtatgtcagaattgataaagtataatgagaagcttaatgaatatatgtaatgaacggtgagcgcctaaggaaagttttctgggcgcttttattaggcaaaacaaccaaatttgaatttgtaactaaaatgaaataaacaggtgattaacgatcagatgattaacgatcagaattcgctatttacccgttaaaaggctgatataatcacaaggaaagtgagaaggaacttgatgatttgacgaaagtgtgaaaaagttatgaaattcgtccttgactattcatattacattcttaataatgtattaagtaattataaatttgattgactgacaactgatattaaaaaagttcgcaactcgttatttaccattgttagtgtaggtttctagtaatgtaacttgttgcactagtggatttttttaattacggcgttagtcaaaaatgggagaaattttttatgtcagacgaaaatagtcgacccttgaataataatgatgatggtatgcaacaaccggaacatcaccatcaccaccacagacatcatcggcgtcaccggggatggaagatcttctggtcagttgtaggggtattagtcctagtcgccctgttctttgcgggaatggcatggcacaacctaaaatcaacgaccgatgatatgtatagtagcgcgggtgctaccaagtcacgggatgcgcaaaaggtccttgaccaaaagaagccggtctcaatcctcctcttagggaccgataccggggcgcttggtcgggactataagggtcggacggatacgatcatggtaatgactttaaatccaaagacgaagacgaccacgattattagtcttcctcgggatatgaaggttaacttacctggttatccgcaatattcaccagcaaagatcaatgctgcctatacctatgggggagtcaaggaatcgattaatacaattcaagaccactttgatattccaattgactactatgtattggttaacatgggtggtttggaaaaggcaatcaaccaagtcggtggggttgatgtcaagtccccattgacgtttgattatgaaggctatcactttgaaaagggtgagacctaccatatgaacggaaagaaagcattggcatttagtcggatgcggtatgacgatcccgatggtgactatggtcggcaacaacggcaacggttagtaatcactgctctgcttaagaagtccgtttcatataaaacggttcttaaccggtcattcttacggtcagtatctgataactcgcaaactgatttaacctttaatgatatgatgcggttagcacaaagttatcgtgatacgaacgaacacatcgtccaagaccatgcgcaagggcgagggcaaaatgaagatggtcaagcctttgaagtggtgccaacgagtgagcaacaacggatcaccaacttgttacaaaatagtttaaaaaattaaatacatgaggagtagaagtcgtgaatagttcacaacaaacagcgaataatacaattgatttgcatcggttaatgatgctctgtcgtaaacatattaagatgttaattatttggacattattagccggagtattggggtatgtcgtggcccagttcgtcgtggtaccaaagtatacggcaacgacagaaatcttggttaatcaaaagcatgaaagtaatgataatgggcaagcatataataatcagcaagccgatttgctattttcttaaatgtatgtttcgcccaattttttgctggtcttatttagttatcttagtactttttttgttttttatacttcatgaatttcatattattattaaattctagactatttaataatgtaagtctaagtctcaatcagtatagtaaattggagactgccaaagctagacatattgatatagactgaactcttttagtatggctgaatcgtaaccgcttactttgattacctacacttgtgcacaaatataatcttggctgatctaatataagcgaggtgataagctatgatacaagtagttacaatcaaagactttagaaaatcatttgagaaatacgctgatgatgtggcaaactataatgaaacaattattgttgcacgtctagagcaaaagaatgttgttgtaatatcggaaaaagaatataactcttggcaagagactaattatctattacaaagtaaagcaaataataatactttggctcattctactaatcagttaagtgattctactaaatatcattttttaacacctaaagaatttgagaggatagcagctgatgaccaattatgttgagcaattaaaattgtttgactttcatcaacgtaaatggcaatttgtagaaacaatgccggctgatttgtttgaagaaatccagaaaaaggttcaattagtgattaaataagattgtaattcttgttatagcaaaggcatccccgtattcttttagtgaggatgccttttagcttatccaacaagcaaacaggacagaaaaacgtaaagatattctcttggcgcgttgtaattaatttcgtattcctgttctaacttatttaagcggtaatctaacgtcgagcgatgaatttgaaggtcaagagcggtttgtttcttattctcgtgatttagaaggaagagtttcaatgttttaaatagttctgaattttcttttgctagtttctgtatttggggacttagataactattcaaagactgatcttggcggatatgatcaagaagatcgagagcaatgtaatcatgatattgattaaacgtgtttgctttccccagtcttattgccttaactgcttgttgatagaattgattaaactggtgcagatgagtgaaagaattgctcagccctgcaccagttttatttctaattaaataaggggctaactcttgcataatcgttttggtgatgagcggactgctattttccaccatataaacattgtaatcatcatagtggaaactaataaacctcgttaggatcgttcctaatggttggatattagttgttggagcctttatacataacacacttaatggttggatattagttgttggagcctttatacataacacacttaatggtcgttttagttgatgagggtcaaattggagacgatttttaatttcacttactgaaatgtttggccgcactagaatatcacgaagcaaaccctcaagattgtttccttgtgattgataggggaagttatgcagcccgactgttgctgaaattttatcaatcactgattcgatcgttgatttgtccttttcaaagttagaacgatcaacaataacaatggcaagatagaagtgatctgaattccgtaaaccgatcttttgcaaatagaaaggttggttaaagtcggcaaatcgatactcttttccgttaccttctcttattgaatgcactgcttgcactaaatgttcatttgcgttatctgcaactctaatatatcctgccttaatggtctttaaccaatcaactaggactggcttaccttttccttcactatgcccgagaagctttaaactggaatcaaaaatcaaaagcgaatttgtaatctttgcttgaataacctgtaaaattcgttgaacaggatgcttatacgaaagagcatcagctaactgattttcccatcctaagtagtcaataacctctctttgtaacaaatttaaaagcgcctctggagtccgggtagtgcggatccacgattgttgcttattacttaacgatttaggactaattaggattttacttaccattttattaccctgatatatctgaaacgcagagccagctagcttaaaatttaacgggctaatgtctaattctcttaatgagttagttaaataataatcttttgcgactttactcacaatatgttctagtttcatctgttttctcctacataatgtagtaatttttaggaaataattactgctttattgacgatgatatatgaatttctttctattatactttaaaacataatgtgaaatgaactacaaagtaattattaagatggagaattagtaaaatgaagaaattaattgttacaggtatagatggtaacttagggagagtggcagctaaagaaattcaaaaattagttccagctgaaagattaatcttttgcagctataacgaggatgcgctcaaaccttatgacaaagttggcattgaaactcaccaaactgattttaatcatgcagaagggctaggggatgcatttaagaatggtgaaaaattgctattaatctctatgccgtttgttggtgctaaacgtcaggctgcgcataagaatgttgtcgatgcagctaaagaagcaggtgttgaccaaattatttatacttccttagtcaatgctgatgatccaacaaatccaagtgttgaaaagaaggatcatatttatacggaaaattatattaaggatagtggtctagattacattttcttacgcaactcgcaatatgccgaggcaatgatcactaactattttacctacgttaagggcgatggtattttgaagaacaatcaaggggatggcttaatggcctacatctcccgtcaagattgtggtaaagcggcggcttatgcattggcttctaatgattatcactctgcaatcttaaatattaatggggcagaagcaatgacaattagtaaattcattgaaattggtaatgaagctactgggaacaatgttagttaccaagagattactgatgaacagaactatgctatttttgatgcaatgggtgttcctcgtacaactgatggaaagttcaagaaagactctgaagcaccattctcaagtgacgggatggtaacgtttggtcaagcaatccgtgaaggaaagatgagtttgaaaaccgatgattttgagaagctcacaggtgaccaacccctaaccgttaaatacatgtttgaacactcggacgacttccaaattggtgcccggcactcacaggataagtaagttaaatccgatataatattgctaaggtcaatcagcgtaaatatgttggttgattttttagttcctaactcgtaagaataacagtaacaatagtaattattctaaaatatagattttatactcaataatatggtaaaattatatcgaatatacgctcgatgacggggtgctgtttgtggatacgattgaaatattgagtgaaactatctcgttaattaatcagctctatttgaattataatcaaatatattttagtggacatccaaagatctataaaatgaataaaacatcatgtacagatgcattaaacgaagagatattattcaccattccaaaatatctggatttactaaatcagtataaacttaatgaaattaatacctcttgtaaaaacttattaccatatttaagatatagaataaaaaggtataaaactgcgacagaaaagttaagagctaaaagcttcttagaaagaactggcgaaggtgcttataatattggaaaagtaattaatgatttaatgggttttaggcttattttaccagatgtaaatatgaataaagataaggttaagttaattcttgaatattatagagacaaaggaataatttggcgttattattacagaaaagataatggttataaagcatttcattgttacttcaaggaaaataataaaacatttccgtgggagttacagatttgggatattcaagatgaagaacaaaataaaaaactacattctgctcatgaaaaacaacgagataatattttagaaggaggaggcaataaatcatgattcaattagtcgaattagttacagttgataatgaagatttagcctaccactatggttcagataacttagatgaagtgtttgaacatgaaagattctttaatgaattgattaaagatattccattatcgtttagttcgcatattcttgctacagaagatgcttcatttgattctttatgtgaaaaagatccatattttaagcagtttcttgcatatcacgacttgaaatttttcataaaaaaagtaaaagaaaaaagtcaacttacagatgaggaagtggcgggttatttaaagactcagtttaacttacatgcatttcctcttcaaaaagttctatattatagttatgctgactacttagagagtaagggacatcgtcttttcttagcatcatttcaagctttcgaccatggccctgttgatcgaaaagtatggcgaaaggcccaggataatttaaaggaattgcaagaaaagaattatgattttatccaaaaagcagcattaaatccttcgattaaggaatttattgataattcggtcaaaaaatatgctaatttttttgattctggacagcgatttgagaattcagaccaaaatccaactcataataatggtacgccatgggatagagcatatagtaaaggacaaaatacgctactatctgatgatgatataaaaaagtatcattacctagaacagataccttaactctttatcaccattagtcaaaaatatggaggtacaacaatgttattcattcatcaaaccggttttgcataagtggcctaagtcaattgggccctgaaaggactattatgcaaaatgttcaattgttatgttattcatgactatatttacagtcatgatgacaaagtatatatgtattctgaattggtaaaggcgctgaataatgctaagccgctaatagattttactttctttagtacggtgactctttaccgaaatgttcacagtattaaacgtgtagtgtcaggtgcaggttcctcctttgagattgattgtgatgattgcaaaaaaattgaggaacaaaaattaaaagacttgtacaagaaagctaagcaatggtatgaggttgccaaagcgcatgaagcttgggatggtcagcttaactacctggctcagtcaaatcaacttggtcaggaaataccagttgaaacgattgctaagccttgcaaaccgtggaggccagttcattatttgacttctcattctagtagtggaatcaagcatggacaagtcaatcattcgatgggtgcaaatgcccgttgtactcaccgcaagcgcttatctgcaagagagttaaaagactatccacttactcaccataaccgtaaagatcgtcgccattattttagattcccagtttttgacgatgacgaatactttactgctaagcattcgactggctggaaatattcaactaagtgtcgccatcaatatcagatccatttataaattaaaatcatattaaaaacacccttgacgaattcgccctcgctcggtatactaatcgtaatttatatgagaatttgctgagatcgaatgagtaactaattatagatttaatagagagctgtgactggtgcaatgcagtatttctagcgttagtgaagatggtttgtgagcgattgatcggtgaataattagcagatcacggcgttgctaccgttacccaagctgcaaatttattactatgaataagtttgtttgagtgcaggattttaaatttcctgaatttgggtggtaccgcgtattgatcgtcccttgaaaagactagtttctttttgaggggcttttttatttacgaggaggggataaagatgacaaagattactgcagaattaactaaaccattactaattgatggcgcaatgtcaacggctttggaacaattaggtgctgataccaataactcattatggacggcgagtgttttagctaaccagccagcattagttaaaaaagttcaccaggaatattttaaggcgggtgcccggttagcgattactgatacttaccaggcaaatgttccggcattcatcaagaatggttattcaaaacaagaggcccattcattgatccagcgagcagtcgtcttggctaaagaagcgcgtgatgaatatcagcaggaaactgggatttataactatgttgcgggagcgcttggtccttatggcgcttatcttgccaacggaagtgaatatagtggtgattaccacctcagtaaaactgaatatcaacaatttcatcgaccacgattaactgatattttaacggttggtgtcgatgtgatcgcaattgaaactcagccgcgcttagatgaagtattggcagaattggaccttgtcaaagaactggctcccgataccctatgctatgtcagtttttccttaaaaaattccacacatttaccagatgggacaccgttagcagttgctgcccgtaccgttgcaaagtatccaaatgtttttgcggttggcgtaaattgtattccattagaagaggtaacagccgccattgagacaatccatcaggcaactgataaaccggttattgcttatcctaattcaagtgcgacttatgatccgacaacaaaaacgtggagctatccccatggacgtcgtggtttagttgattacttaccacaatggctcgcggctggattgacaattgttgggggatgctgtactactacgccgcatgatattgccgctttgcatgagtacttggaaggaggcacccatcatgactaagaaaacgcatttagcccgtgaaatgggtgctcgtcatatccagatgattgcgcttggtggagtgatcgggaccggcctatttctgagttctggttacacgattcatcaggctgggccgttgggaaccgttattgcttatttgcttggcgccttaatcgtttatgctatcatgttatgtttaggtgagctgagtgttgcgatgccgtatacgggggcttttcatgtttactccaaaaatctgattgggccggccactggatttaccgttgcaatcctttattggttgacttggacgattgcgatgggctccgaatttaccgcagctggcctaattatgaagcgctggtttcctcagattccggtttggtggtggagcttgttatttatcattattatcctcttatctaacatttttactgtcaaggcatttgcagaaagtgaattttggtttgcggtgattaaagtggttgcgatctgcgcgtttattttgttggggactttagcagtaattggtcttatcccgattcaaggttaccatcatgcacctttgctgaacaactttactaaggacggcctattcccgggtggatttagcggcttatttatgacgatgttaacggtaaactttgctttctctgggaccgaattaatcgccatcaccgcgggggaaactaagcatcctgaaaagactcttcctaaggcgatccatactactttatggcggttagtgatcttctttgttggaagcatgatcgttatggcttctttgattccttatcaaaaggcaggggtaacacaaagtccatttgtctacgtttttagccaactcggaattccatatgctgccgacttaatgaattttgtcgtcctcaccgcgattatctctgccgctaattctggcctatacgcatcaacccggatgttatggtcattagctaatgaaggaacaattccagctgtcatcgccaaaactaatagacgcgggattcctgttttcgccttgctcttaagtatgcttggtggggtgttagctttgctttccagcatctatgcggctggaacggtctatttagttttggtttctgtttctggattggcggttgtctttgtatggattgcgatttccttatgtgagctcatttttcgtcggcgctttttagcggctggtcatcagttaagtgagttaaagtatcgcacgccatggtatccgattgttccatggtttgcatttattgctagcagcctttcttgcatcttaatttggtttgatccccaacaacgaattgccttgtattgtacgattccgtttgtaattgcttgttatgctgcttattatttacagaccttgtggcgcaagtatactacgaagaaaaaggtttcaacagttgttaaatagatgtaaaaaagctgtaattaaaaaattcataacgcgtagtaaaatgtacgaggataatttttaattaggagatataaaatgcattcactatttttactacagttgattcagacagtcttagtagcaatccaattagtaatgatcttctcagctaataaagttaagcgagaatggttaaccgttagccagctgtgcatcgcggtcgtaatcttagccgacttattttcagaattgatcttctttagttatacaagtgtccttactggctgtgtattattcctccagttattcttgctcccaatgttttggaaacagctaaaggcatttgaagaataatataaataggtgagcggaaattaacttccttgacaagacggttaattctcactcacttttttaatcaaaaaagcaccatgagacttactccatagtgctttcctatattattcgttgacaaccatatcatttacatattgttgcagttgtttaatcattttctcggataaatgattaacaataactccattgcgagcatgatagtcaaaattctgtaattgccataaaacaacgtatcctttaaccccggtgctgacactaccatttattaaaatgggcatgtaacgaggattgttagaatagttagcggttgtgattggcatcccaataaacatatgggttgcctcattataggcggatgtactcatgacaacataatgtctgcggatatttccttttttaggattatgtccacccatttcatgtcctgcgtgaagttctgcatcggcaattataatatctccctttttaggaaattccattaatcaattacctcacgtcctacttgttttactggctgtaatgctgggtcgttttcgatatctttttgataatcgtattctttccaatctttggtggcaaaaatatttttcctttttgcaacaggggtaaatacaattgtcttaccaacattctttacggtatattcttctccagttactttaattcctgacggtacggttaacgttcttgaattaccagtttgtctcagtttaacagtcatattacccctccttatatgtatactcagtatatactaaaatggtaaaagaaaaagacctttaccaggacgttcacgaaagtagtataaagtatgctaaaatgataaagattattaagaccaatcaacgttatgtattgactggccttttgtaattttaaatataattaagtgggttttatttatgaagaaaagaaaattaaagaagagtttagcaacaactgcgacggtaatggctgttacaacgggggtgacggccattagtaattccgctaaagctgatacagtacaaaatagtaaaaatactattcaacaaacgctgcctgatacgaaccaacaagctcagcgaaatgtcagtacagcccaagacgcagtgaatagagccaatgctgatgtagcaaccgcaaataatgatcttaatattgctaatcaaaatttggcagacgcggattctcaagcaaaggtacaggaaaaaataagcaatagttcaaatcaggctgttaataatgctcagcaagaatatgataatgttcaaagtgacttaacaaagtatcaacaagagtatcagcgaatactgaaagttccagtattctatttaaatactatgatgaattcagacaaacctttagtatttgacttggcaaactatgatggttacaaagggcagaatgcacaagcggaaaagaattttaaactcaaagcatatcaggataatattgatctcttaaaagaggttattagaagaaaccagagctttgttgacaatgattataaaaatacaccggcttattataacttaggtaccattaattatgaaataaatgcagttaataaggaattaactgagcttaatcaaataatgattgaaaagaaaaagggtacttttaaccaatatcaacattatcatgattggattacaaaggatcgttcgcgttcatggctagatttagaatctgcggatatcagtgatattcaagagataattgattggcatcataaaataatagaagaagatcaaaagaaggctgctgaagtattgccaattgcgaaaaaagaattagaaacaggaaattactatttaagtgtttctaagaatcttttgccacaactggaagaagtgactaacaatcttattgagacacaagaaaagcttacatatgctaaaagtaatttagattcaacaagacggaaagcttggcaagatagtgtactcttatcacaaattgaaggagatcgtgctaatgctcaatcccaagcaatcaatgcgcaaacgaagctcttacaagcacttctcaataagacaaattcacaagaaaagttagcgtcagcaaaagagaaattaccgatgcaaactgatgccttaaagtacagttcgctaatcaaccttgaaccattaacaattgagccaggagaaactcctcttcctaaagttacgacagcgattgcagttgagaatgatcatcaaaataaagctgttattactttacccggcgatgagcaagaaaataagctgcctcagggaacaaaggtagtgtggaaagatgatgctaaagttgcgaccgaccttcaacgtcccggaaagcatactgaagatgtcttgattgtttttcctgatggatcggtagttttaactagcgagcaagttactgtttccgcaacagaaaaacaggcagacgctaataaagaaacttcgcctgcacagaaaacaattgatagtacacaagaaaataatatgcgtgcgaatgatctttctgcccaggtagtggaagttaatgatgataatcaaacctcagcaccagaaatattggtgacttcgcaaaccaagcaacataccgtccgaccaaacgaggtaataaaaggtcaggcagatcagaataagattacccagccttcattagctaagtcttttaagaataaaacaacaaataatattttgccacgaaccggggatgaatcttcacttccgattattgcccttggcgctattattgggctagtaggaattggggcaacacttaaacggtacgaataaatttgtttttcgtcatgctagtctatataatcaatgaaaatacaatatttgaaaggatcgacacatgagtaactggcgtaatctatttgcacaacgaatttatgaacggggtagggattactactatcgcgataaagttaaaaacttaataatcgatgaagacgataatttttctgcaatcgttaagggaaatcgggcttataaagtaactggtagataccataatggaaagttttctcaacttcattgtgattgtccctatgcgcaggataaccatcgttgtaaacatatggccgcggttttagaggcgattgatgatgattcggcaaatattgaaccgcaaaaatcattaggggaggtttttcaatcagcttttccgccaaaccgtttaccagttgatccgcaaagttttctaagtaaagaagtctttccgctacggctgattgaacatgtctttactaatcttgacgatgttcaaattatttctgaaatcctaattaaagctgcagatgcttatttcacaattcctggagctaagtggaattattcagtggctgggcgttttaaacaatattacttttcagtgctagttgcttttaatcgagaaatgattgtggacgtccaggtagactttataaagacaagagaaggacaacagattgctgaaatggttgccctttattacttgttaaggtaccttgatcaacataatattgaagagaatactaatgaagcagcccggcaaatgctagctaattttcttgatcgcgatcctgatagtcagacgatcattactgctaatatcggtgaatactacgatggtggtcaatacctttacttccgggcaggtgtaccagatcatatgtataagtttccaaacttgacaaccttaacaaatgggattgcccgtggtgagcggcttcatttaggaaagttctttgatcagcaaattacccccgaaaaccttgataaagatagtaaacaatggttagacttgatcatcaagctatcctcgaccgctgatttaacgcgcgatgggtattacgaagcatccgtaaaaaatgagctgcccctggctggcgtgattatggatgaagttgaccaaatattaaagaccggtaatatgctttataatcggtggaaagtgcctattaagcgggaagaacgtgcattaaaagcagcagtttcaattaaagcaaatggtgctgatgacgatccaagtcgttaccttgatgttagtgttgaccttccggctgaccttattcgtggacaggcagcctattaccaccttgatgaccatacctggactgcttttacaggaatagcccctgataagttagaccctgtttttccagtaaccagtgatcttgtttttggtgttgatactatgtctgagttttaccgctatgtgttacccaagattcagtcgatgttttcagtcgagatgccccaagatcgcgatttatcaaagtttttacctccattaccaacagtagttttcttattggattatcatgacgaacaaatttattgtgacttggcaactgaaattgatggaaaaacacaaaaaattaagaaaattgatgaccttccgcaatttttgatgcaaagagttgaacaggtactagctaaatatttcaccaagtttaatcaaaccgggactagagcagttctgttagttgatgaggcaacaaatttgctagcaactggcgtcaatgaattgcaagaaataggaattactaaggctactcctgcatttaatgggttatacaaacagccgtttactaaggtaagtgtcggtatctccgttgattctggccttttaaagcttgattttggtgatgatcaactaactgctaaagaaatcaagcaaattctaagagatttccggccgcataaacagtactatcaattgggcaagaaaaccttgaagatggatgaaccttcgctaactgaattagttgagacattgcgcaaaatgggaatctcatcacgtgattttactgcggaagaacttaaattgccggtgtatcgtgctctttatcttgatgatcttttatcccaccaagaagcattgaattatcgtactacttcagaattgcaccagctagttactgatgttaaaactccgcagaaagattttaaggtgccggcaaatcttcatgcaacattgcgtccctaccaatatgatggtgtccagtggctaataaccttaatgaagtatcattttggtggactgttagctgatgagatgggactagggaagaccctgcaagttattactgttctgttaagtgaacaaggaaacggacagaatttaattgttgctccagcggcagttatctataattggcaagacgagcttaaaaagtttgcgccagatcttaaagtaaccgtccttgatggtagtaaagctgaacggcggaaacagttcgcacaaagcacagaaagtgatatcattattacttcctatgatgccgctaaacgagatattgatttttatgaagggcatctctttaatattgaagttattgatgaggcccaatacattaaaaatccccaaactgctgccgctaaaacggtcaaagcgatcaatgctaagcagcgttttgctttaaccggaaccccgattgagaaccggttaagcgaactctggagtatttttgactacttgatgccggggttacttggttcctaccagcagttccgcaaacagtatgaaggaccgattattaaaaatcaggatgagcaagctcaggacgacttaaaacgtttggtacaaccattcatgctccgtcgtttgaagcaagatgtccttaatgatttaccgatgaaaaatgaacaggtatttttaacgcccatggttggtaaacaagaacgcctatatcaggcacgtgctcaaagattgataagacagattcaaaaacagaatgataaagagtttcagcagaataaattagcagtcttggcagaaattactcgtcttcgtgaactatgttgcagtcctcaattgttagatagggggtacagtggtccttcgggaaaaattaaggcaactatgaatttaattaaagatgaaatggcagataatcataaaattttactcttctcgcagttcacatcggcattagcaatcttaaaagaaaaacttgctaaagcaggaattaagtactttgtgattgaaggaaagacaaagaaagcagatcgtttacaatttgttgatgaatttaattcctatgatcagccagccgtcttcttaatttctctgaaagcaggaggaacggggttaaatcttacgagtgctgatgttgtcattcattttgacccgtggtggaatattgcggctgaaaatcaggcgactgaccgagctcaccggattggtcaaaagaataacgtgacgatttataaaatgattgcacaaaacacaattgaagagaaaatcattgaaatgcaacagaaaaaagcagctcttgctaattctattctttcaggaaatgagctagcaaatgccgtcatcaacaaggagacactccttaacatcctcaaataatataggttttgtgaagttttgtcctaagtccctataaaatcccgctataacttgctatacttaaaatattaatatgtgaaaaaagggatgagaagaatggtaatggttgatttgcattgtcaccttttgccggggattgatgatggttcaaaaagtatggagatttcattgcgacttgcaaaagaagcaacagaaaacggggttacccatgcacttttgacccctcaccatatgaacggacactatgtaaaccataaacaagatgttttagcgcgaacaaaagaatttcaggaagaactggagaaaaataatattccactaactgtctttcctggacaagaagtgcgaattaatggtcagctaattgaagctcttgataatgatgatattctatttgctgatgagagtggaaagtatatgatgttggaatttccagacaatgatgtccctcattacactaatcagatgatttttaaccttcaacaacgggggattacgccagtggttgttcaccctgaacggaataccaagatcatggctgaaccggacttgctttatcaaatgttggaaaaagggtgcctatcacaaatcactgctagttcctatgttggtacatttggtaaaaaagtcgaaaaattcagtaagaacctgattgcggctggtcaaggatatatctttgcttctgatgctcatgaccttccaggacgaaaatatgaaatgcgacaagcctttgacaaattatcgcgtgaatttggcgctgacgttgcccaagaataccaagataatgcgcgagctatcattaatggggatgaaattggtcgccatcagattaagaaggttcagcaacgtaagaaattatttgggttattttaaaaaactaagattagttcagagactgtgacataaatcaagttacttttgtaaaagataaatagcgcagtacaacaatggccttcagcgtccggcaaagtcgaatgctgaaggcctattgttgcttgcgggggctcgaaaacgaagtcacaagtgacttctgtctcgctcccttctgtaaaatgtaagattttaagtggatttaacgattttttgcgtatatataatattagagacactatttttaggaggaacttatgcgttttttacatacggctgattggcatattggcaagacattaaacgattttagcttgcttgatgatcagctagcaacctttaagcagattgaagcaattgccaaagaccagcaagttgatgcgatagtgattgccggggatttatatgatcggtccgtgcccaatgaagcagcggttggacttttaaaccagatgctgcaagaattaaatttgactgatcattttcctttactggcaatcagtgggaaccatgactcagcggtccgtttgagtacggggactgattggtttgcttaccagtcatttttcttaaatactaacattaatgatgcttttaccccggtcacaatcaaggatacccagtttttcttattgccattctttgggattcaagaagttcgcaactattttaatgacgacaagattaaaaatgtcaatgatgcgatggcacgaattacagctgagatggaaaagcattttgcccctggtaaaaggcatgtccttgtcgcccatttctttgcggctggaagtaagcgaacggctgattctgaaactttgattgaggttggtggattgagtgcagttacgacagatgttttagctccctttgattatgttgctcttggccaccttcataaccgcaatgctttaaatgacgaaaaaattaagtatagtggctcaccaatgaagttttcagtatcggaagccaagcaagaaaaaggcgtttggattgttgatacagcaccttttaaggccgaatgggttccactatcgccagctcatgatattcaccttttgaaagggagttttactgaactggctacaaaacctgaagaagcattacgggaagatttttatgacattgaattgaccgaccaagaacgaatccccgatgtactaaacaagttacgcgaatattatccgaagattgtcagccttcaccggacacatcaggccaagcaggttcaactcaaccttagtaaaaagcgtgctcaggaatcaccccttgatttacttgcggatttttattcccaaacgatgggaaatggtttaactgaccgccaaaagaagtgggcagaaaaggccttgactcaaatcatgaaaggggaggaataggatgcgtccattaacgattgaactacactactttgggccgtatgagcatcaagtgattgactttatgcagttcatagagcattccttatttctggtagcaggaaatactggtgcggggaaaaccacaatttttgatgcaatgtgttatgcactttttggtcaaacaaccaatgatcgtgatcggtcggctgctgctttacgttctgatttcgcaccagctgaccaagaaacaatggtaaagtttacctttgaacaccaagaccttaaatatcaaattatgcgtcgtcctaaacaggttttaaagggacgccgcggcaatttagttgaacataatcaagccgtcgatcttatttacccgcttgaaagcgatcatccccatgaaattactaaaattaaggaagcagacacgtttattactgacctgctcaacctaacccgtgatcaatttaagcagattgttcttctccctcaaggaaagtttcggcagtttctcgattcagatagcaatacgaaggaagctcttttgcgtgacctttttaatacgtcccgttatgagcagtgggcaacgcaactaaaaaatgatttgcgtgaacagaagaagtcattgacgacccaagaaacaaaacttcaatcattaaaggaaacagtaaccgcgattgatgcgcaattaacaactaaagaatggttagcggaagaaaaaaattacttatcccgactaaaagctaatcttgaacacttgggcgatgatgagcagcaacagcaaaagaaagttgatcagcttgatgcccaacttcatactgagcaagagttgaagaagaatattgaggagttagctgaacttatcaaggctggaaaaacactgcaagctcaagcgggagagatccaagaaacaaagcagcaagtaaaagtccttgaatggtaccaagaacaccagacagaatatcaacggtggaaagatggcgaaaaacgtctccaaaaattaacgttagacaataaatttctccatgaggacctgcgcaaccttcaaaagcaacagcaaacaattgaaaccgacctacaacaaacgagtaagcagcaagaagaaattgatcagcttcaaactgaggtcgccgacttgacgaataaactcccattcttcgatgatcgagataagctaaaatcagctgtcgatgaactacaaacacacttaaagcagcaggaaaaacagcaagctgcttcccagaagaagttgcaagacgctcaacagcaattgacggttgttactaataatttaaaagagcatgaaaacttgggtgaggttcaagttcacatagcaaaacaagaaggccttcaggaaaaattaacgactgctggaaaagatttaaagcaattagaaacaaaacttttatctgaaaagaaaaattgcgcgaaattagagcaaaagcagggggatgctgaaaaactcgttcaaaaatcgcaaggtgagttggatgacttgaatgatcgctttgcccgtcaccaaattgccattcttgctcaaaaattaaagccagccaccccttgtccaatttgtggatcgcttgatcatccccatccagcgaatttagcagatgatggtgaattggtaacggaagcacaagttaaagcagcaaccgttaaagttcaacaaaatcgtagtacgtttgaccagttaaaagagcaagttcgccaaagcgtttcccaaattgctaacttaacaacacgggtagaaaccaagcaggtaaatttagccgaactattaggggataatgaattaccgagtgattgggaaggacaaattgaaaatcacgctcaaaaactagcagaaatgaagactgacctcgatagaatagaacaacaggttaaagaatggcaccgagaagaggaagaattggaacaagaatccaagttctctcaagaagaattagataaaatagacgaaagtgtgaaccgctgcaaacaggatttaatcgctaagcagactattctgaaagaaaaaacagccgctttaccagcaaaatttcctactaaagaagctgctgacaagcaaattcaaactgatcaactaacgatcaaagcctttaataaccagcttgaattattgcaacaacaacgacaagaaaatgccgaaaaattagcagggacaaatagtcggatcgaccagactaaagaagaacttgccacccaaacgacgcaacaggataacttacaccaatatcttgtgaaccttttagcccaatatgatgtccaacttaaatggaatttctggcaagaagctagtgaacaagtagcaacattgtcatcattacgtgaacaggtaacgacctttgagaatcaagtccaggataatcagtcccaacaagagcggttgactaaggccatcaataatcatcccatgccagatattacgtcaacgcagaccaaacttaatactgagcgtgaacaacttcggcaatatcagcaagaaatgggtcagttaactgctcagtataagcaattagaagaaacggatcaaaaggttattaaggtagtcgaaaaaaccggaaaacttgatcaagaaattaatgaattacaaacattaacagatgttgtgactggtaatactgaaaaccatgttagcttagaacggtatgtattacaggcatattttcaagaggtcttagtagcagccaatgttcagttagaccggttaactaatggtcgctaccagtttgaattagcaacagaaagtcatggggctggtgccaagtggagtggacttgaagttaatgtatatgatgataatgctggtagaacgcgaagtgcccggacgctttctggtggtgaaagttttatggcttcacttgctcttgctttagctctctgccagattgtccaagagcaaagtgggggaattaagattgatgcgctctttatcgatgaaggatttggttcccttgatcagcaagctcttgaagatgctcttcattcccttcaagaactcgaaggccaccggatgattggaattatcagtcatatcactgaacttgaggagcaaattccagatcagttaattgttcgatcaagaaatggccgtagttatgtcgcataccagcatgaaatataagttcaaaacagtatttaaatttgcgatgatgaaattagataaaaaattaaaaataaaaagtgcaaaaattagtttttttcgtatatatatttataggggaggtgatttgcgagatgaagacttgttcgttcatagactcctttccccattatttgctgtcttcgtctgcaatcacttccctaatgggagctgtgatatgagtcaagttgctttcataatgaggtgacagcgcagtacaacaatggtctatcatcgcttggcaaagctgttggtgactattgatgtttgcgtggcctccaaaggctaggtttgagtcaaaaaacgaagtaacaggtgattcctgtctcgctctctttcttctcccacaaatctcaatgtaaagatctcttatctgctcttttacgaaccaccagataggagatctttattttttaaataaaaagtgcaaatgttatctttttccgtatatatttaagtgaaggcctaaaaaatgcatttaatgctctttaactccatattatcttccacagtcaaatcggccttcatttcaaaagctaggaaattattcttagctttttcttataataaaaaagtcattattgtggggagggcaataatgactttgaaattatttatcttaatgatttacgatatccagcggcttgcgcttctgcttctgagttaaagtaaaccgcatttgctgaattcatatgatagccttgttgatcagacgtatggtagatttttgaacgagcattaccaacgatcataccggcctgatcggttcgcatatcaccgttattcgatggcgcagttgaactgctgcttgtattaactgctgaactttcctcactactgctgctcgatgatatttctgaagatgattcgctttcaacaaggcgcaatgcattttgaaataggaactttgggaaaccatgagttcgatgaaggcttagctgagtatatgcggattgttaatggtgatgaacctactaaacaatataataaagctgagatggcctatcctcatgtgaaaacagggattaatattattaccgccaatgttgtgaataagtctgatggtcagatcccgtttggaatgcaaccatacttgattaaagaaattcatactagtgatggtaaagttgcccggatcggctttattgggattgaaactacttccctaccaattttaaccttatacgataattacaaagattatgatgttttagatgaggctgaaacaattgcaaaatatgatcaaattttacgcaaaaaaggtgttaacgcaattgtagttcttgcccatataggggtttcaactaataaagatggcagcactaagggtaatgctgttgatattattaagaggctttaccaaattgaccctgataattctgtcgacctttatattgccggtcactcccaccaatatgctaatgctactgttggaagtgtaaaattagtgcaagccatttacacgggtaaagcttacgatgatattatcggttacatcgatccaacaactaatgattttgcgcccaatagtctcgtttcacatgtctttccggtactatctgaaaaggatgcgcctaatatcaaaacagatgcaaatgttacagcaattgttgaagatgctaacaatcgagtagcaccaattattaataagaaaataggggaagctgctacaacaggcgatattcttggacgactacataatacccctactcgtgaaaatgccgttggtgaattagttgtcgatggtcaattatatgctgctcataaggtgggcttactagcagattttgcgatgactaatacaggcggcgttcgtgcagatctgcatgttaatcctgatcgttccattacatggggagtgcccaagcggttcaaccatttggtaatattttgcgggtagttgaaatgacaggggcacaaatcgttgaagccttgaatcaacaatacgacgaagatcaagcttattacttacaaatttccgggcttcgttatacttatactgatcaaaacgatcctaaccaaccatataaggtcgttcaagtttatgaccaacataatcaaccgcttgatatgaataagacttacaatgttgttattaatgactttttagcaggtggcggagatggcttttctgcatttaagggtaccaaagttgtcgggattgttggtcaagatacagacgcgtttattgattatattactgatatgactaatgatggtaaaccaattaccgcactaacaatgaaccgtaagatttacttgactgctgaacaattagcaaaagctgactcagattcacagtcacaaacaggaactaatcggaacactcaaaacgatgctaattcccagactgaaggaaatcagcttcaagaggttccaagccaaccggtatctccaacagtaaccttgccaacaacagctggtcaaccagccgaaactgttacattacacggtcaacctaagcaacaaaccgtagctgctgctaataatcaattaattaatttgacgcctacatcaatcaatggccaaaaacaaaaagtagctgaccagcaagcagctttaccacaaactggtaacgatgaggatcttgcattacttcttctcggaagctcattaatggcagtaaccggattgacaattattgatcgcaagcgcaaacatgcttaattacttaaaatagactgttactttcattatttgggagttagcagtctatttttcactattttattttctcgctataatggaaacgataaagtaaaaatggggtaagaacatggcagaaaatatcatcaatattttaaaaaccaataatatgaccgtcgcgtttgtcgctcaagaaagcggcctcgacgttgcgcaggttaacgaaacacttaaacggcccgttgcaacttggtcaattcagattcttaatgcacttgcagatgctttaggagagcgtccaggagaattattagatcggattcaagactttgatttttacctccatactgacgatgatcaattaacgattcagcacgtgcagttccaaacaccttcttcctatcaacaagttcgttttgccgttgaaagtaatgttttagagggatggaaacctacagcaacagaggtaagacaattaaaagagagtgccgaaaatccagatgatgaaattttaatggaaattgagcagctatttggtgatgaagatgactgatgaagaacttcaagcaaaatttttatatgataatggaacgcttagcaataaatttgcaattaaaaatgcagatgaattaagtttaatcgagtatcgtggtgtggcagaaagggaagtggctctcctgcaacaacaaccgaaaattaaaagctttgaagatttacagacaattaataaattcctttttggttggctttatgactgggcgggtgagttacgtaactactacatttcaaaagcaggttttgattttttggaatatggtcgctttgataatgcaattaagtatattaatgatgaaattgggcgattgaataagaaaaagcagcctaccattgaggattatgctgctctcttaaatgatttgaactatattcatccgtttcgtgaaggaaatgggcggtcaactaaattatttatccagttaattgccctccatcatggccaggtaattgattacccagcagacaacgcggaaatgattgccgggttaaaccaatcagatgtcggtattattgccaagaccatggcattacaaaaaagtgctggttaatttagtttactagctgcttgtttatcaagaatcactgttacgtttggatgctgttggagggctgatgccggaacagcagtcgtgattttaccgttgaccattttgttgattgcgtctgctttttgctcaccaaaagcgagtaagatgatatgttttgcttgcaagattgaaccgattcccatcgtgtaggcttctgttggtacatccttgcttgaagtaaagaaacgcgcgttggcattgatagtagcaggggttaactttactttatgggtttggctatcaaaaggggttccaggctcattaaaaccgatatgaccattattaccaattcctaaaatttgcgtatcaatagggtaagtagccaaaatctgattatagtgattaattacttcagtggcattcagattactgccatccggaataaaacttttggcaaatggcttttgagcgaaaagatgatatttcataaagtaatgataactttgcggatcagttgatttaagaccgacatattcatcaagattaatcgaaataaggttagaataatcaacagaactattagtcattttttgataaaggcctagtggagaactccctgttgcaaggccaagtacttgggcaccgttaataatatctgtttggagaaattcaaaggcattttggcttgctacttctttatttttcgttacaagaattttcatcctcatcacctcacgactattgtaattcttttaaggaaaaagaaaagagcaattgctaatgtaatgcttattctttagatttgacaaaaatattattgaatgcgcttacaaaaatatgtaaaataagggtgttgctgaaacaatctgataagaattggggaaagtttaatgaaatttaaaaaattaacagtaatgtgtgctgttttatcaggtttactattagggagctcggcgatgacggtggttccagctactacctatgcagcctctaatgataagcaggtgacaatctatcttacacgtcacggggaaactactggtaatgtaatgcaacgggtacaaggatcgagtgattttccattaaccaaaaatggaattaccgttgctaatgatttgggctatggattaaaggggattaaatttaagcatgcttacacgggtaacttaacacgtcaagaagttactgcgcaacaagcattgaagtattctgccaatccaaatacaaagattacgaccacaccaatgttacgtgaaggcggatacggtagctttgaaggagatagtattgaagctgataaccagaagattgctaatgtttatggttatcaagatggcaagcagttccagcaagcaacgggcaaagattactggaataagctccaagatgcctaccacaaacttgatatggacaattcacaaaataccaagttggctaaaaatgatcgggcagaaagttcagctcaggtgcaaaaacggatgaattcagaattgcttcacattgcaaaaacaactcaaaaacagggtggtggcaatgttttagttgttagttcaggaatgtcaattaatgaatatctttcaaccatttctaaaaaatatgatgggaagccaatgcagaatgcggcagtaaccaagcttgtttataagaatggcaaacttcacgttgatggcccaattggtacgcttcactatgtaaataaaggaaagaaaatagcagcaaataagtaaaatgaattatctttcagcaacacatatgttttttgcaattatcgaattattatttggggactctttgatcagaaatcagggagtctttttttggaagggagatagtaccaatggaaaacttaacggttaagctgtttggagaaattactgaaaagcagcttccgggtttagcattatttgaaaatcgaattggctctgggaaaacaacgggtgccctgcagtgggtaacggacatgctaatgaaaagtaaggaatctgatgtcattatctacataactcccaaccgacagaatcgagatgaagcatggcggggattggttagacaagcatatcgaagaattctttgcgacgaatcagttaaacttaatcgataatcggatcgcaagggatgaaaggatagaagatatcaagatcgcgttggttcagcttctaccaacagttaaaatcaatattagaccgaccgttgaagataaatttggatataatctagtggtgattaataataagcggtatttccaaactcatgaagatgttaaagataattatgcgagagactatcagcaggcaatagtgcaacatttgacaattggaagtacgttaattaattcattaaaagagttgataataaagaaagatttgaaagaaagaagcttaagtctgtatcattaactagattcaatagtgggatgggagttttatcaagttgcaaaggaagcttatggtacccaagcagtctatctatttaaaatgattaatagtgatgagttcgaggtgagacggttagatttacaagaaagctcaaaatttattaattctgatgatacagatcttcagtacctaattaaaactcctgccaatactttctacaatttaaacaggaaaaatatctttactttgcctaatgctgagctttttggcgatatcaacgagatgattagtcatcaaaattgttcatcagtaacaaaagcggaacttaaacgggctttgaatgatttaagtaaaagttaccctaattacagaactaaataccaaaatcttatttctatcattaataaaagagagctaaattcatttaacatcaatgacttaaaagatgaatttaattttattaagaaaaataaaatactaagtccaattgcaattaatttgttattggatgaattatatgaacaatatggactagttttgaaagtgaaaccaaaaataaaatcccatgttcaaaagcatctctctggattaaccgatattaattatttcgttgataacggcgatcaggatgttatttactataatgtaggaaccattagtaaaaatatgaatatatcaattgcaaaggcatcacacatctggcaacttcagcctaacattaaattaaatgagcgtggtttcgctacgattgagaccgaaaatatcttgaagtttcttcaactgatgatggtgaattttgtacgatttcatcaattaacagtaattccttttccatttaaataccttcgagaatttattcaacttgaagaaaagatcagctaaaaaagatgtgacagatttactgaaatgatgagataatactaggagggatggggtgatgatggtgaaaagtactaaaaagaaacgatcacatattgggttaattatatttactatattactggtaatcttgttaggaattttaggggtaaattataaacggtttgctagtaagcaacttaacccagttcgtgacaataaagtagtaaaaaaagattcgcctaaaataacaaagactgcaaagattgttggatcgtatcgagatgatcaagacggtgcagctattgccttaaatgaaaatggaacaggtcagtatgtttatgcagataagaataatccggatacagatgatagcttaacatggcgtaaagaaggagaacactaccttataaatttggaagatcgtgacgtaactaatccccttaccgcaacgcttgataataataaattagttgttacaggtagtaatggctggaataccgaaacattccaaaaagttaatgaagagttaaaccttcaacaatttttgaatgatatgcataaaaaataaaataaatgcttgtaaaggatttagagataggatataataaaatccctgtcagcgatgggagatagataatcgcttgtaacttcttagatttatttaacttagttgcaaagtctcaacaataatttaaaaatattattgacatcccatcgacaacatgatatattaataaagttgctgattgagttatagatctaaaggaattcgaaattgattaaaatttattcttgacaagccaatccgatatatgttataattgctgtgttgggtggctacttaattagccaacaggtagacctttgaaaactgaacaaagtttcgacgaatcaaatgtgtagggtcttcaatcacgatgtgatttgaagcaaaacatttgcgaagtcaattcgcttaataacaaagataatttagagctattcaagttcttatatattttatatgagagtttgatcctggctcaggatgaacgccggcggtgtgcctaatacatgcaagtcgtacgcactggcccaactgattgatggtgcttgcacctgattgacgatggattaccagtgagtggcggacgggtgagtaacacgtaggtaacctgccccggagcgggggataacatttggaaacagatgctaataccgcataacaacaaaagccacatggcttttgtttgaaagatggctttggctatcactctgggatggacctgcggtgcattagctagttggtaaggtaacggcttaccaaggcgatgatgcatagccgagttgagagactgatcggccacaatggaactgagacacggtccatactcctacgggaggcagcagtagggaatcttccacaatgggcgcaagcctgatggagcaacaccgcgtgagtgaagaagggtttcggctcgtaaagctctgttgttggagaagaacgtgcgtgagagtaactgttcacgcagtgacggtatccaaccagaaagtcacggctaactacgtgccagcagccgcggtaatacgtaggtggcaagcgttatccggatttattgggcgtaaagcgagcgcaggcggttgcttaggtctgatgtgaaagccttcggcttaaccgaagaagtgcatcggaaaccgggcgacttgagtgcagaagaggacagtggaactccatgtgtagcggtggaatgcgtagatatatggaagaacaccagtggcgaaggcggctgtctggtctgcaactgacgctgaggctcgaaagcatgggtagcgaacaggattagataccctggtagtccatgccgtaaacgatgagtgctaggtgttggagggtttccgcccttcagtgccggagctaacgcattaagcactccgcctggggagtacgaccgcaaggttgaaactcaaaggaattgacgggggcccgcacaagcggtggagcatgtggtttaattcgaagctacgcgaagaaccttaccaggtcttgacatcttgcgctaaccttagagataaggcgttcccttcggggacgcaatgacaggtggtgcatggtcgtcgtcagctcgtgtcgtgagatgttgggttaagtcccgcaacgagcgcaacccttgttactagttgccagcattaagttgggcactctagtgagactgccggtgacaaaccggaggaaggtggggacgacgtcagatcatcatgccccttatgacctgggctacacacgtgctacaatggacggtacaacgagtcgcaagctcgcgagagtaagctaatctcttaaagccgttctcagttcggactgtaggctgcaactcgcctacacgaagtcggaatcgctagtaatcgcggatcagcatgccgcggtgaatacgttcccgggccttgtacacaccgcccgtcacaccatgggagtttgtaacgcccaaagtcggtgcctaacctttatggagggagccgcctaaggcgggacagatgactggggtgaagtcgtaacaaggtagccgtaggagaacctgcggctggatcacctcctttctaaggaataaaacggaacctacacatcgaagaaactttgtttagttttgaggggtttaccctcagagcttgtactttgaaaactaaatactatctaatttctttattaacaaaacaataaacgagaacaccgcgttatttgagttttaattaacgaattataatcgctaactcaattaatcagacaatctttgattgtttaggttaagttatgaagggcgcatggtgaatgccttggtactaggagccgatgaaggacgggactaacaccgatatgcttcgggagcggtaagtacgctttgatccggagatttccgaatggggcaacccaatcagcttagtcgctgattacttgactagtgaatacatagctagcaagaggtagacgcagcgaactgaaacatcttagtagctgcaggaagagaaagaaacatcgattccctgagtagcggcgagcgaaaagggaagagcccaaaccaacaagcttgcttgttggggttgtaggactgaacattagagttaccaaagtgcgacgtagtcgcaacagttgggaagctgtgccatagagggtgaaagccccgtagacgaaacgtcacactctctgttcaggatcctgagtacggcgggacacgtgaaaccccgtcggacccgcgaggaccatctcgcaaggctaaatactccctagtgaccgatagtgaaccagtaccgtgagggaaaggtgaaaagcaccccggaaggggagtgaaatagttcctgaaaccatgtgcctacaagctgtcggagcccgttaatgggtgacggcgtgcctcttgcagaatgaaccggcgagttacgattgcatgcaaggttaaggtggaaaaaccggagccgtagcgaaagcgagtctttaaatgggcgtaaggagtatgtagttgtagacccgaaaccaggtgacctacccatgtccaggttgaaggtgcggtaaagcgcactggaggaccgaacccgtgtcagttgaaaatggctggg

SEQ ID NO: 55 - DNA, 12147 bp, synthetic construct
  misc_feature 1..12147: note = Based on Lactobacillus reuteri
  source 1..12147: mol_type = other DNA
cctttcactgacattaatgcttttttcatctcattcatttcatctgctgtgaaaatatgtttaattccattttcaaaatacatgatatttttcatcaatttttcctcctacaaattaattactccatcttcatcggctgcaatctcatatcggttcatgatactctgcaattcatattctaatcgctgaaaatcggccacaaacttcttcgccatctcaactgacagccgattttctgttggcgtttcttttaataattttcgccaacgttgccgagttgcctttggtgcatcaccataaattgatgggtcaatcatcaatgctaaaatcattgcctgttctcttacggttggcaaatttttatacttgggaataaaaaattgttctaacattttttgaactaatttcggataatcctgcactttattcccccgcaactgcaactcaactcgccaccaactttcaacattaactgtctttccatgacgagcttcttgttcaacttttttgttatactggcgaatctgctgaccggatttcatggatccataataagtcgtttccatttggcctttctggttcataatcacctgtttacccgtcccaaaacgccatacctgataatctttggctgttggttcattaaataaatcaaaggcaatatcacaccgactaaaatgtttatcctgaatcgacgcaattaattttaacaaccactgaccgccctcactttgtaacccatggttggggttaaaatcaattctaattttatctttcaaaaattttggtgagttaataaaggcgacttgttcaggggcaacatacgcatgacggttgccaaaatcatcttgataacaattactgtcatctaccacttgaatcccaccattaacatcttgaataaatgattttctcagccactctcgcatatcattatttaatcgatcactgtcataatgacccacaacggtaatccgatcaatcgatactcgaatatccgctttatgtttaactacttcattgcccataataaaaaggctccttcctaccacgtggtaagtcgggaacctacttgttgtcttttaaatgactacttaatgactacaaatcgatatcgttttcgtgttatactaattacgttaatcaaataatagatttccaactcacgtgtatctgatcgccaaatctttgatacccacgtgggtttttctttttgttttattttcatttacgagtttaattttaccacattcacattcccaaaattttaaaaagtctcagtaatgagtactttagctggctgttagacggagccagctaaaaattcacttttttcaatttcacaaagtgaacatggcaactttacaaaatagtagttagctcatcagctaactgcttagttaatttatcgatttccggtttctgataacccatctgtttcaatcctctctcaaagctagttcgtaatagaccatgcgaaatcgcaagctcatgataaccattaagccaaagtttagttaattccaaatctgtcatttcagcccctcctttgcagatttaatgctcaaacagatactaacccctgtggaccccttgctctttgtcggaaatccagcctattagctggctctccgacccgcaagcttatcacaggggttctctgttttgcgccttaaaacctgcttattaacgttctctgcccttattatgcttgaactgcatctgattcgtgttttcttttgtaggatactgcttagcaatctgattaagtagttctttttgatcttctggcactttcgtatctttagtccaaggtaatttattattatctgcaaaataagcatcaatttgctgccttaattcaaactcactgtttaataacgcatcttcagtagtcacacgatcaaacatctctttcctcaagatttcatcttctggaattctcgaagacaatcctattttgtaagccaactcatagttttgtaatgcctggttttggtcattaatgattttttcataaggctttttaacttctaacttcgttaaagcatcatccaaattcttgtatcctaaatttttactcatttcttcataacgattgattttttgttctcttttaagaagcttttcccaacgctcctttaattttcttacaaattcttttagccattcaaaaacataaggtaatgtacttatctgccgttcattttcttcgtcccagtgtccatatgattccggacttctagataatcgtacttcttcttcaggagaaattgttgggcgatcaggttcgatttcatcagcaacttttgttatctgtctttctaattcatctaacacatcgcctttttcatcaagctctatcttttggaactctaactgctcacgttccccttggactttatcctccatattcttaatatttttgacttgctccattgagcgtccaacatctttagtacccttacgataaaactccaagcccttaaatttatctggatattcttttctaaactcacgctctaaaatgcaagccattttacgatcaaaaaccgaacgataccactttaatgcttctcttccactggcctccttctcacccgtagcacgctcataaaaatttactagggtctggtttaacgaattgcttacacggccattacgggtcttcccagtggcatacagctcataatgaatatgaggtgcccctgcttcgtccacatgaatgctatatgctcctggaacaaaataattaaataactgtgcaccattcattttgtaattagtcgatacaaaatcacctaatgctttttcatataccccataaaattttttagctacttccgaattagtgataacaagtgttttgccatcgggacttgatggaatatcaattgattcatagctacctttcggacaaagctgttcaattaattgattgcgattctccatatcaccaactgtcgccacaacagtaatcttcttttttgatttcaaaaactttttaactgaaccaaatactctctctggatgacgacttttaatcgcattttgatcatgctttcttacatagtcgccaaaatatttttccattttttgatcaatttccgcttgtgaaaaaactcgaccattaacattatattgagttaagttttccaaaatatctttgttcgaatgctcaacatttggatcatgttcaacatgttttttgattcccgaccacccatttgcagtctttgaaaaattaattgtcgatgtaactttcactactcactacctcctaatgccgcaaagtaattaacttcagtataccacaatatttgcgcgcaaatatagctccttagaatttttgcgcaaggcgacaaaaaacggagccctgtctggggattgagtttcactcaaagggaccatttcatggagagtcgcttttgaaaaaagcaacgcaaaataaaaaaagtgcttcgctttagcgagcgcactttttcggttcgtcaatcgagactgcgttcgattttcctcacaaaaataattgctgtttaaacgcaattatttttcacaaagtcggcagcattcatcaacttaatctaaataatccaagaagatcaacttcaaattttgcaaagcttccgaatttcctttcactgacattaatgcttttttcatctcattcatttcatctgctgtgaaaatatgtttaattccattttcaaaatacatgatatttttcatcaatttttcctcctacaaattaattactccatcttcatcggctgcaatctcatatcggttcatgatactctgcaattcatattctaatcgctgaaaatcggccacaaacttcttcgccatctcaactgacagccgattttctgttggcgtttcttttaataattttcgccaacgttgccgagttgcctttggtgcatcaccataaattgatgggtcaatcatcaatgctaaaatcattgcctgttctcttacggttggcaaatttttatacttgggaataaaaaattgttctaacattttttgaactaatttcggataatcctgcactttattcccccgcaactgcaactcaactcgccaccaactttcaacattaactgtctttccatgacgagcttcttgttcaacttttttgttatactggcgaatctgctgaccggatttcatggatccataataagtcgtttccatttggcctttctggttcataatcacctgtttacccgtcccaaaacgccatacctgataatctttggctgttggttcattaaataaatcaaaggcaatatcacaccgactaaaatgtttatcctgaatcgacgcaattaattttaacaaccactgaccgccctcactttgtaacccatggttggggttaaaatcaattctaattttatctttcaaaaattttggtgagttaataaaggcgacttgttcaggggcaacatacgcatgacggttgccaaaatcatcttgataacaattactgtcatctaccacttgaatcccaccattaacatcttgaataaatgattttctcagccactctcgcatatcattatttaatcgatcactgtcataatgacccacaacggtaatccgatcaatcgatactcgaatatccgctttatgtttaactacttcattgcccataataaaaaggctccttcctaccacgtggtaagtcgggaacctacttgttgtcttttaaatgactacttaatgactacaaatcgatatcgttttcgtgttatactaattacgttaatcaaataatagatttccaactcacgtgtatctgatcgccaaatctttgatacccacgtgggtttttctttttgttttattttcatttacgagtttaattttaccacattcacattcccaaaattttaaaaagtctcagtaatgagtactttagctggctgttagacggagccagctaaaaattcacttttttcaatttcacaaagtgaacatggcaactttacaaaatagtagttagctcatcagctaactgcttagttaatttatcgatttccggtttctgataacccatctgtttcaatcctctctcaaagctagttcgtaatagaccatgcgaaatcgcaagctcatgataaccattaagccaaagtttagttaattccaaatctgtcatttcagcccctcctttgcagatttaatgctcaaacagatactaacccctgtggaccccttgctctttgtcggaaatccagcctattagctggctctccgacccgcaagcttatcacaggggttgtctgttttgcgccttaaaacctgctcatttgcgttctcgtcccttctcaggcattttaatctgtgcatgggagaatttatcgtttgaacgttctaaatgctcagcgagcttctcagccggttttataataccttcctcaacttgcattcgataaaattgcggttgcgcaattggacttggtaactcaaaatttttctcaaattccgcaaatgccttttctttcgcagcaatcgttttttcccgctccgagagttcctgatctttttgtttcagcctttcaaagcgccgtttaagctgttggcgaaccatttcaatcacctttcgcaaggattgaaaaacatattcaatatcaaattgcttagctaatttaggaattaattcagcatgttcagaaagctttactcgctcacctttttcgtctttcgccgtaacttccggattaatttctgcaatggttttcagcccttgctcttttaatttagtttcatgctggcggttctgcttaatggtgtcctgtacatgcttatactcgttaactgataattttttccgttgcgaattttctgaacctctcacgacttcatagccttgttcttgcatgtatcggggaaactcggtctggattgttcgcaatgtgttacggtcaaacacttgttttgagcttaactttccgtctttggtcatcgggacaattcccatatgcatgtggggagttgtctcgtcataatgcacgctggcatacatcacattttctgaaccaaatttttgctggaaatatgctaatgctgatttaaaatacccctcatttcgctcagaatgccccgtatcgaagaattccctatctgacgatataatccactcatcgaccattacagcgtctctacggagcttacgtgagcttctacggcgtttattaatataatcaacaatatcttgcttatgaagtttatgatctgcaactaattcaatattctgatctgatttgttcgggtcaatatctttatttttatgatttttagtctctctaaaatcatgacgaagcataccagataagttctcagctttcattttcttcattgtggcgacggcataatgtgacattttaacccctccaaagtctactcaattaaccaacttaaattatatcacctcggatgcagttaactgctatttttttcggtataacttccatgtaaagtataacccactatactttaccaaggtaaagagtgggctctccgcgaggctcgtctgcgacgccgttgcgcgtaagtatacgcgcaagtctccgcattcgctccgacctgttccatctgagactcaatcgaatttcgcctttaggctcattcgagtttcgttcagatttcactctcgtatttttttgagattcgcctttaggctcattcaaaaaattactcacgatttgccaatcaaaaaattggcaaatttcgcttttttcacaaaaaagctcagcaaaaaatcggacagttttgcacccaaattctgaccaatgaccaacgaccacatagggggggtgtcgtagtaccccccaatgagtcgagataaactcttactcccccaagcgttcaagccgtatttcctcaactagagggggggttacacttttaaattttaaaatctctgtattccttggggctgtaagatgaccaacgaaagcaaaaaagtgtaaccccggttacacttttttgctttctatttctttaaatatttatttgaactactcccacttagctaaacctacggtttaatgcttgaagtgggagattctggaaacatcgcatacttaccctaccgattctgaacgaaccttcaagcagaggttacgactattagccaaggctcgtcccgagcctagtagtttcatcggactaccgcctaagtacgtgttcaaaatacatactggcttggttttcgccagctatttttagcctgattgcaactcgtggcgttgtctcagcacaaactcgaagttactctatacgaaattactcagtgtcctcatggtgaagcaatgttaacagctttattttcgatgcattagaaccagtttaattagttgaattatatcatatcagagggctattcatcccccacttgtcgaagtgggggtattctcgccaattatggataaattgacagcatcaatcaacttaatctaaatattctaagaaaattaattttaagttttgcaaagcttccgaattgcctttcactgacattaatgcttttttcatctcattcatttcatctgctgtgaaaacatgtttagttccatcttcaaaatacatgatatttttcatcaaattttcctcctacaaattaatcgtatcgtcttcatcggcggccacattaaagcgattcatgatactttgcaattcatattccaatcgctgaaaatcttccacaaacttctttgccatcgccaccgacaatcgattatccttttgtacttctttcatcatcttacgccaccgttgttttgttttaggtgatccactggcataaatagatggttcgtacatcatcgcaaaaaccattgcttgttggctaggatttttcaatgacttatattctggaacgtaaaattcctccaacatttttcggactaagcttggataatctgcaatcttatttccgcgtaattgcaattcaacccgccaccaactatcaacattcactaactttccatgacgggcttgttgttccaactttttattatactgacgaatctgttgccccgatttcatcgacccataataagtagtctgcatcttcccatcgggtcccataataatttgttttcccgtgccaaatcgataaacttgataatcttgggcagtgggttcattgaaaatatcaaaggcaatatcacaccgactaaaatgcttattttgcaacttggcgatcaattgcaaaacccactgaccaccctcgctatccaagccatgattggggttaaaatcaatccgaatcttatccttcaaaaatctaggcgagttaataaaggcgacttgttcgggtgccacatacgcatgccgattaccaaaatcatcttggtaacaattgctatcatcaacaacttggatgccatcactaatatcttgcacaaacggcttcttcagccactctcgcatatcatggtccaacctgtcacttggataagctgctactactgttaatcggtcaatcgataccttaatttctggtgctttctctacaacttccttacacataataaaaacaggctccctcctgccacgtggcgagttaaaacctgtttctcttatgtgcatcattttgtcatcactatttattttattaatatcattttcatgctatactaataacgttaacaaaataacatacaggttttaactcacgtgttcctagtcggccaaaactatgaactgcacgtgggttttcttttttgatttatttaatttacgagtctaattttaccacattcactaactggaaattttaaaaaatggtcatatgtgactattttagctggctgttagattgagccagctaaaaaatcatgttttttaaatttcacaaacttttgtcattctactctctatccaaaactgacaaaatataatcccgaatcagattttttgtccacgccggaacttttttcttttctgtcaactcattcaaaatcaaatacgcacttcgcaaatcactgatggttgcatccaacttttcttgttcttctgccgttaaatcaccaagctcccaatctgtctgaatgtcctcaacttgcttcccaaaaaccttttggtacctcaacccacttttcgcatagtccgaaatcgtcattccttgacgagtagaatttaaatccaacctcatcttttcctcacgagttaatcgtacccgtaaataatctgtttttgtttccatttttctacctcctttctgtttgttaccacatttatttattgatatattaacatttatttgtggtaacgtcaaaacaaaaaggcgagaattctatttaaatcctcgccaataatcgctataataaaaatgtgcactggcaaccaccaatgcacaagttagtcttaggagctgatacctcttgaaggtgtactcttttgcgcttggctggtggtgtattgctgtacaccagaacaagagcgctaccgttaagctatcagcctaattgttgaatataatatattcttctaggtgtttatattatagcatggtttagcgacttggacgaccgtctagctatctggctaggcggtttttctgttaactggcagatttaatgctcaaacagacactaacccctgtggaccccttgctttttgtcggaaatccagcctattagctggctctccgacccgcaagcttatcacaggggttgtctgttttgcgccttaaaacctgctcatttgcgttctcgtcccttctcaggcattttaatctgtgcatgggagaatttatcgtttgaacgttctaaatgctcagcgagcttctcagccggttttataataccttcctcaacttgcattcgataaaattgcggttgcgcaattggacttggtaactcaaaatttttctcaaattccgcaaatgccttttctttcgcagcaatcgttttttcccgctccgagagttcctgatctttttgtttcagcctttcaaagcgccgtttaagctgttggcgaaccatttcaatcacctttcgcaaggattgaaaaacatattcaatatcaaattgcttagctaatttaggaattaattcagcatgttcagaaagctttactcgctcacctttttcgtctttcgccgtaacttccggattaatttctgcaatggttttcagcccttgctcttttaatttagtttcatgctggcggttctgcttaatggtgtcctgtacatgcttatactcgttaactgataattttttccgttgcgaattttctgaacctctcacgacttcatagccttgttcttgcatgtatcggggaaactcggtctggattgttcgcaatgtgttacggtcaaacacttgttttgagcttaactttccgtctttggtcatcgggacaattcccatatgcatgtggggagttgtctcgtcataatgcacgctggcatacatcacattttctgaaccaaatttttgctggaaatatgctaatgctgatttaaaatacccctcatttcgctcagaatgccccgtatcgaagaattccctatctgacgatataatccactcatcgaccattacagcgtctctacggagcttacgtgagcttctacggcgtttattaatataatcaacaatatcttgcttatgaagtttatgatctgcaactaattcaatattctgatctgatttgttcgggtcaatatctttatttttatgatttttagtctctctaaaatcatgacgaagcataccagataagttctcagctttcattttcttcattgtggcgacggcataatgtgacattttaacccctccaaagtctactcaattaaccaacttaaattatatcacctcggatgcagttaactgctatttttttcggtataacttccatgtaaagtataacccactatactttaccaaggtaaagagtgggctctccgcgaggctcgtctgcgacgccgttgcgcgtaagtatacgcgcaagtctccgcattcgctccgacctgttccatctgagactcaatcgaatttcgcctttaggctcattcgagtttcgttcagatttcactctcgtatttttttgagattcgcctttaggctcattcaaaaaattactcacgatttgccaatcaaaaaattggcaaatttcgcttttttcacaaaaaagctcagcaaaaaatcggacagttttgcacccaaattctgaccaatgaccaacgaccacatagggggggtgtcgtagtaccccccaatgagtcgagataaactcttactcccccaagcgttcaagccgtatttcctcaactagagggggggttacacttttaaattttaaaatctctgtattccttggggctgtaagatgaccaacgaaagcaaaaaagtgtaaccccggttacacttttttgctttctatttctttaaatatttatttgaactactcccacttagctaaacctacggtttaatgcttgaagtgggagattctggaaacatcgcatacttaccctaccgattctgaacgaaccttcaagcagaggttacgactattagccaaggctcgtcccgagcctaactttatctatcggatagctaatcctttttgcaagatgacttgtgcagcgttaatatcacgatctaaatgtttaccacagtttggacaatcccactcacgtaccgctaaccattccgatttattcaatcctaaccgatgattattcttcccacaattagcacaaatttggctagtatatgacggattgacctgaataagctttttaccgtaccagtcacacttatattgcaacatatctactaattttgaccagctagcgttagcgattgctctagctaaatggtgattcttcatcattcccttagtattaagtttttccaacacaatgatgtcgtactttttgaccaatttagtagtgaatttttgtagctgatccaaccgttggttggcaatcttttgtcgatacttcgccaccataatacgagctttctgataattcttaaaatcatctaattgccgtggaactaacactttattatgatgatcccaggcgatttcctgctgggcctttaagaaccgacgactacgcaatttctcccaacgatacaactttttacggtatttgtcttcaaaatg

SEQ ID NO: 56 - DNA, 11403 bp, synthetic construct
  misc_feature 1..11403: note = Based on Lactobacillus reuteri
  source 1..11403: mol_type = other DNA
atgctagctaacgctagtcctagtgataaattgtctaaacgcttgcaagcaatctttgcccaagcatctatttctcggcgtgatatgttgggtgcaatgattggcgccggtatgaatattgctacagcaaaaagtgaatcatttgcagtgaatgaactcaaacagcagtatatcgatggctataataattcaagccctaataaactatcaacagttccagataaagtagccaaccaagctgagtattctcaacgaatttgggtgcatggcgacgtcatgacgacacgaatgaaagaaaccctgaacaagggtttgagtcgccgcatgaagaaatcagacatcaataaaatgacccgcagtattcctcaaagcggtgatcgaattgatgacaatttaacaacgcctatgaaccaaatgctatccagaattcatacgttaacaactaatgaagctatacgcaatagcaacggtggtaagaatagagcgtatgatgaacagaatgttcagtatgtgatgtggttaaccgaggaagatgatcgtgtttgtgatatttgtgaaccacttgatagacaaacatttgcctatggacaagcaccgattccagtcacggatactcatccaaggtgtcgttgccagctggtagcctgtgatgaagatgggaatctgctgtctggtgaacttgatagggtatttaaggaacaaaaaaagcccacttagtttaaaactaagtgggtcaggaatattattaattggctccgctcacaacaaagtcgaggggtgctaactaagttagcatctataattagcgatgcgttcatgactatggacagtaagattaacatcttttagtacaggcttagaaaagctttttgatacatgacttaaagttaataataatgaatttggattagatgatcctgtaatcaaattttctagactaacgtttaagatccttgctaaagcaattaaattgtccaaattaggttctgtatcaccattttcccattttgatactgcctgacgagatacaaaaagtaaattagcaatatctgtttgagaaagttgctgctcagttcgtaatttgagtagctgatgagcaaaagcattgtgcatattaatctccccgttctattaaaattgcatagtttatttctactaacatttttgttttacgtcaatataatccctagataataatgtttgcgtaactagcaactaaatgttgctagcatacagacgtaaagctagcagatacttaaatcaaagtatgaggggaatatggagttgtaatgattaaccagattgataagaattaggctagggtctaatggaatattttccaaaagaagctatgaccaatattatctgtttcttcttttggtagtttagctggtaatgatttttgctgttgatgtgtggttaaatctaattgttgagcctgatcagcaagcttattagcggtagcaatttgttcatctttaatagttaattgcttctttaacagtttgattatctcagcttgttcattaactctggccgttaattgattgatgatatcgtctttagttgcatttttgtgctgttttacctcagaattaggtttaaactgataatattttttcatttcctgataaacgctgttactgtagtatttagcgttgtgatttccagttttaacaggcttaaaatgatgtttttggataaaacgagaggctgaaactactgaaatgctgaattcccttgctaaatctgaggttgtatatgttttagttttacttttatccatgttttagcctcctttagcctaattctagcatataattgttattgctatttgataggaattaagtttatacttaacaagtaagcgttatacgcctactaacagtttaataaatttagagtaaagaaaaagcccgttaaagtactccaatactttaacgagctaccgattaactaggacaagtagtaaatcggggttgtctatttctttaatacaattattgtaggggaaatagatggatatttcaagatataacactataaaactattactgaaatcaaaccctaaaatactaaaccgactagttaatcgctagtcgtttttttcttttggttcgcaaccggtaaactcaaaagcggcggcaccgcatcgtagtagcatctcgaaaacgcccgtgacctcttggatgtatagaggttgtagtcaacatcatgggaaagccaatcccgtacgctttacaaacgtcaaaagagcggctataggaagccttggaaatgcttcagataacccataacattatttagtgagtctttatgatggtttctcacagttgcgacagcttaatttgctgcctagcggacaaaaagaaccagcccgctgaacagggtataggtggaaacacaagagcagaatgttattgggacaagggcagggtgcgtttaaactatctgcattgcaattattaatgagcttagtagtgttaaattactgagttgatcaataattgcgatgagtcgactgagagaacaatgctctctcgagacttagccactgacaggctaagtctcgagagagcaagctggagcaagttctttgcggaagcttgctcttcctttaataggttaaggataagtgggtaaaacttatagttaaaactgtctttcatcgtctttgttaaggcgtttgttcattgcattggtaatttgctgagtagctttttgtctttgtttttgattagcaaatagaattgccttttgtaatttaaggatggggtcattattgagcttgttcattagctgtttttctctttggtaatcaaatggatgtttagaagcttgaattgtagatggatctagataccttgattttaggtttggtttgggttgattggggttcgttggagttgttagagttttggtgatttggtcaacgaatttgagtgcttcttcttttactttttgaagagctttagcagcaaccttaatcaggtatttgatgttttgtttgaggtgttgttgacgaccaggatcagtgttaactggttgagggcgttcattgttgtttagtaatgattgttcgacttgatgtgatggatcgttttgggcaattgaatcgacaagttggtttttgtaggagttaatgttatcttgaatggcttggttagatgttgttaattgatcattttgggtttgcaggtctttattgtcattaataagcttagtgtgtttggtttgatctgtttgccattgttgccgttgatcattgcgccattggtcgatggaggcttcaacatcgttgatattgtctgcggttattggttcattatcaccgtacattaggttattacggtcaaattcctgttgagcttccttaacgcgctgtaatttgcgttgctttaattgttcgtcagcatcgttaatttggttttgtaaagtttgtagttgttgtcgctgttgatttagtagctgttcttgttgttcttgctgctgtttggcagctttttctttttcttgagtagctaccatgtctttatctgcttgttctttattgctttgagaggccctagcagcgtgtgtaatgccatttgccatttctaagggtgttagatcatttccgtccttatcaactgcctggtggcctgtggtggcctcatagatggctttgagattcttagtaacagtttcaacctgatgtttgacattattattctgattggtaaggtcgttagtttgcttttgcagtgattggatagcttctttgtgttcagcaatttcttggtgttgagcttttagttgttccattgaaagtccggtttgaagcgatttgtcagtctcagttttacgttcaaactcaagaatttttttattttgggggactttataagttttatgcagctcggtttccaagcatttaagggcaaatttatctatgctagcccggtaccatttggtagctgctcggcctgagcaatattgacctgttaccgcatggtgtaggctgactaatgcttgattgagtgagttagtcgcatgggcaggtcgctttttaccgccacgtgtcatgccaaaggttgctatctcgtaatggatatgtgagattcccatttcatcgttgttagtagcatagcggccgcgatgtaaataatcgccaatatttactcgttttcctgatttgagattccaaccaacattgttattagtagcagtaattaaagtgcgattgaagcaatcgtaaaatcgtttagcgacagcaatgttatttttaatcggctgctcgtgttcgtcttttagcttaaaaacaagatgagtagttccatcgggaagcttttcctctacgtacgaagaagccgggcaaaactctttcatcaattgactttgaacttccatattgccaatggtcaaaactgcagtagcttttttcttcctcttgagaaagttttttacacttccgtattgtcgttcagcatgacctttttctcgttgatgttggtcgtgctgttccacgtagttatggaagtgttgctcattccaatcgtcaatagcttgacgggtggcagttgattcatcatatacgttaaattgagtttcactgaatacaatatccttgtttgaatggttaatactctggtcatgttccacgtgcttttgaataccagaataaccattagtatcttttgcctgtaagtctgttgttactgtacatttcaatgccattatttcatcaccagcgttcatagttttacattttaattgtagcacgttcagtaatgagtaaagtggataacttatccaatttactagctccctagtcaaaatggagtaatcccattttgtcggtcgctcttccgagggaattaggaacacatttcctaataaccattgatttaattttcaagattgtatttgaaaattaaatattaccttttaatcaaaaggtaataccaaaataaaaaattcccaatgtctttcgacaaagggaattttttacaatccagctttaacatttagttaatctggattgttcccattgggaaattcattatcatgtaatggattctttcccaatggttttgcgtgactttgttcctgctgctcttgttttattttagccacaaatgcagtcacaaaatcatgcaaatcttttttcgcaaatggcttttgatcatcaccaatttgcgaatcaataatgctgtttaagcgttgcattaagtcatcattattgctggccgaagttagcatagcttcggccaattccgctttccattttagttcgtttaaggctaaaacatcagcgttatgtttcatctggagcttcttatactccatatcttcaggaacagtacgaccactcagttttttggctttaagttcttgccaacgggcaattgatttaggggacatcatgataaaaacttctttctattaagtaattagattaactattatgagaagttaacagtcaatctcttgcccaaagcgttagcaattttggttaaagtatcaatactggtgttggcgccgctttcaattcgtgcaattgttgattgaggaacatcagaaacagtagctagatctcgttgagaaaggcctgattcttttctaaccttagttaatgcaatggcactctctaacttagttgtttcgttttcaaattcctttttaaattccggatcctttaattgttcatttaagtagtctttaaaattaatgttgctcataattattgctcctttcggttggcaaagtattcgtcacgtaatttcttagcatgattaatttctcgtggcggtgttttctgggttttcttagtaaagccatgggtaataacgtagtgaacgccatcaacgtgaaaataaaggccacgttgttgattattactaacccgagagcgaatttcatagaggttcttctccagtggcttaacccagttatgttgaattccagcactaagtccataagttgcgaccatgttaatccgtgctaataactttgctttagctttaacgtcaagactatctaaatattctgcaaattcagtatggccattagggcgagtataaaattcaaattctaaatcttccatgccctaatgatagcatatattgtattaattatcaatatatgctatctagaacaactaccgtgcttcgcttgctggactcgttaatcagaacggtttatgactaaacctaacctgattaacgagtgaatttttttgggggggagtgcttaatcgaacttaacttcatcgagcatttgttctcggctgacttgatccagacctaaatattttaaggtcatggcttctgaggaatgattaagcagcgacatcactggggggagtgcttaatcgaacttaacttcatcgagcatttgttctcggctgacttgatccagacctaaatattttaaggtcatggcttctgaggaatgattaagcagcgacatcactaaaccgatattgtaatgagtttgtgtgtagacccggtaagccccagtttttctcattgtgtgagtaccgaggtagttaatcccaagtaaatcgccagttttagccatgattttgtaaaactgtttttcagtgatgtgccgatcggggtgtttagtcgatggaaaaagccaatctgagtggagattttgttggtttagccactgaaaatagtcttttaggtcttgtttaactggttttaggtacaaagtattgggctttccggtctttttatcccgaatataagcatttttagcgatagtcccatcgttattgaagatctcattgcgtctgagagctaataaatcggacactcggagtaacgttgccttgccaacttggaaaattgtgtaatttcggcggccagctttaaaattatgtaggagagtatcttcgacttcatgcaggatattggaatctttgatgggtaaaacgagttgtttcatgattaattgctccttatttaggggctactttttgtatatataaattaaaagcccctatattctgattgtagaatacaggggcttgacatatcaacattctataggggctatttatcacaaatagaccctattatgaactggtttcagtcaatcttttttattaatctttcaatttgataataattaattgttattacgaataagtcttacagcaataatcaaaagaaatgggattaaagttagcacaaaactaacggtaaatatacttaaatttttgatggtatctttagattgggtcatgaagtccgtcctaacttattggttttgtcacttataagtttaaggcttcatggcctttttggtctagttatttaggtgttgcacttacattgtaaatccggcgtcacaaaaaaattgactgacgagtcaataattcgttgactcgtcagtcaatcgcgactatactggaaaaggttgatcagataccgacatattaaaacgtgtttcaagtttgaccttaaggaggatgacaaaaatgacaacagctattatcgaacttgaccatcttcaaaaaaactttggcaagtttgccgcattaaaagatgtcagtttcacgttggcacccggtcaggttctgggttttctaggacctaatggggccggcaaatccacgaccattcgagttattttaggcttattaaaaaagagtggcggctcagtgaccgtcttcggcaaagatgcctggcgggatgatgcggcgattcatccacgcatcgcctatgttcctggggacgtttatttatggccaaatctttctggcggcgaaattatcgacctattgctacgtttaaatggccgccagcataatcaaaagaccgatgaactaatcaaggcctttgaatttgatccgaagaaaaaagctcgtacctattcaaaaggcaatcgtcaaaaagtagcgttaattgctgcgttttcgcaagatgccgatttgtatatttttgatgaacccacttctgggcttgatccattaaatgaacagactttccagcaagaagttttaaaactgaaaagagccggtaaaagtgtgctgctatcaagccacattttgtccgaagtcgagcgaatgtgtgattcaattgttatcatccgtgatggtagtgtgattgagagcggcaatcttgatcaattacggcatctatcgcggatcaaaattgaagtcaccaccgctaccccaatgactgctttggcaaagcaagctggcgttcacgacctcacttatcgcgattccgagcacaccaaggcggttttcaccgctgatcgagacgcgcttggcaccatcatgaccacactggccgccaacaccgtggtcgacatgcaatcaacgccgccaacgctggaagagttattcctgcgttattatggaaagcaaggtgagactcatgcggcacagtaatcggaacgcaggttatctgcttcgggcaaacctcaaacaaaatctaaaattttcactcatctggcttgtcattttgatcatgatgattgccagtggtgctggcaaattggaagcagactttgcaggcggggcctcgggctctaaagagattgtcaaaatgctgcaagcgccgggcatggcggcaatgtttggcgcgatgccaaaggtggacacgtataacacagcgattgtgtttgctggtgtgatggtcgtcttcatgattattttgcaggccttatgggttatgccgctgatgattcgcaacacccgcggtcaagaagaaagtggcttgctcgaaatggttcgcgctcgcaatgttgggcgaacggctgccatcaccgccgcttcgcttgagcttctcatcgacagtgccataatgggtatcctctattttgtctcgttggccgctgtcaacatgggtggtactgacttgtacggtgacttcctgttttcactggggatggtgatcgccaacttgctattcggagccattgcgttgctattcgcgcaactaaccaataacacacgtacagccaatatgttgagctacatggtgctgactgccgcttatttggttcggctggtcaccgatatccagcatcaaaatctgacgtggttatcaccaattggttggttcgaaaaagcaaacttctatactgataacaacgtctgggctttaggtttggccttactggtcagcattctgcttgcggccagcgccaccatgattgcccgcaaccgcgatctgggcgccgggattattgctgaacgcaccggccgagccaaagctgccggctggcttcgctcgatccctgccttactgtggcgaactgagcgcggattatttgctgggtggttaatcggcgccgtggtgtttggcggcgtcatgggtagtgtgctcggcggcgttggcgacattcttaaaacgaatccgctttatcgtaaaatactagatgttggccaaatcaacgctgccaatcagaccatggtcctgtcattcttaggcatgtatctcggcattttcgtcgcattagccgtgactgctggcgtccaagtggcattccgactcaaacgcgatgacaaccttggttacttgagcgtcattcatgccgaaaagccaacgcgaaccacgatcagtgtcagctactattgctttggtctgctggcaggcgtgttcgtcctttctgctgggctgctggccttgttcttcactgggaacactgttctcagtcacccgttgccgctcaagtacctcggtcgcctattcgtggctagcgttccggctgtgatatcgtttatcgcccttggcatcgcactagtcggtctgtggccacgcttaagcagtctattctggctgtatatgggagccggtctgatcgttcaaattttccggggattgtttgatttgccaaaacacgcaggcaacttcacaccttttggctggattgccaatgtaccggttgaaaacgttgatcaaacatggctaatcgtgatggttgttagcgctatagtattatttattcttggcattgctggttatcgccgtcaggatttgagcctatgaaaaatgttgtgacagatcctgaaaaggtcacccgaatcctcaaaacagcgacggaaattttcggccagcaaggcttcatcaagagcaaaaccgatcagattgccaaccaagcacaagtatctaagggcttgctcttccattattttggcaataaacaagcgctgtatcttgacgctttcaaatatgcctatcatcgaatttatgatcacatggaccctaaaaagtggcagaatgcccctggcttggctgccatgatgaccactgcagttaagtatgagttgaaactacaattcaaattcccagctgaataccgcttgattatgcaagcctatgctgatttaccgcattttcccgaaccgttgcgacaacaagtgcagcaagaaacaactgccatatccgctgaaatcgatcgcatttttcgcgagaaaattgaacagctgcctcgtcgtgagggcctgtcagtcgatgacgttttcggtgtcgtttctgccttaatcgcccaacaaacggcggtcaccatcagactcattgccagtggccattatcgcaagtttgaagatctgcagtccgtggttgagacgatagcacgccagttattgattgtcgaacacggctttttaccagatgaaagttgacgtcagctgatagatcaaaaaaggtcattagggtataccctagtggccgtttttatttctgtgctatactaggaattacaatcgttcattagaactgtccaaaaggagaattggaaatggctaaaatcggttatgcgcgtgtgagttccaaggagcaacatttagatcgacagttagcggctttaaaagacgttgataaattatttacggataaattaagtggggctaacactaatcggccagaactgcaaaaaatgctggcctatattcgtgagggtgatattgtaatggtcactgaattagatcgcttaggcagaaacaaccatgatttgactaagatcatgaactccattcaaaataagggtgccaccctagatgtgttaaatttgccgtccatgacagggattgctgacccaaatttacgtcaactgatgaccaacttgattattgaactctataagtatcaggccgaaagtgaacgtaagcgaatcattgagcgccagcaacaagggattgccttagctaagcagcagggtaaatatcatgggcgcaaaccccaatatgccaaagatgatccccgtttgcaacatgcttttaagctttatcgagctggcatgagtgacattgatgtgtcccgaaatacaggtattaaacggacgacctttattcgataccgtgtgaaatacggtattaaaagaaaatagggcgcccttttggttagcacatgttaactgaaagggtccctattttctttacttaaaaggtagattgatgaa

SEQ ID NO: 57 - DNA, 4653 bp, synthetic construct
  misc_feature 1..4653: note = Based on Lactobacillus reuteri
  source 1..4653: mol_type = other DNA
ttggcaatctttcacctatcagcaaaaatcattagtcgaggaaaagggcaatcagcaattgcctcggctgcttatcgttcagggaacaaacttcacgatgaacgatacgacgaaacacaagattacacaaacaaacgtttcatcgaacactcagaaatccaacttccagagaatgccccagctaagtatcaagatagggcaaccctttggaacagcgtagaaaaggcagaaaaagctaagaattcgcagttagctagagaaattgaaatagccttaccacgagagctaacaccagaacaacgagttaaattagtccacgattacgttcagaaaacctttgtcgataagggaatggtagccgattggtctattcacaacccacaaccagataaggataatccagaaaagccagcaaacccgcacgctcatatcatgctcacactgcgtagcttgcgttctaacggctcttgggcaccaaagaagacaagtcactatgaactagacgaaaacggccagaaggtgcctgtaatcgatcctgagacaggcaaacagaagttaggggcgaaaaaccaaaaaatctggaaacgagtaattaccccaactaatgactggaataaccccaaaaacgttgaaaaatggcgggctgaatgggcgaagacttgtaataagtacttggctcctgaccaccagattgaccaccgcagttataaacggcagggcaaaaaacaaattccaacaatccatgagggctatgttgctcgtaaaatggaacgagaagccacaggaagctcagagagggcttcttttaaccaaatcgtaaaatatatcaacaacgagttaaaatcgcttagaaagcaaattaggggcattatacgcgaaatacggaatctagaaaaaggacgtgaccaagatgagaaagttcgacttcagcaagacacccgagcaaatcaaacaagaacaagcagagatcaagcgctgggaggaggagttcaacgcacgattacagacaatcgggagcaatccggaaacggtagagccaacggaactgccgaagaagcccaacgaacagatcctaatcaacttcatcaacagtctttcggagaaacagcaagaagaattttccgagatttccggctatttgcggagcgtcaacgagaagctcgacagcgacaacgccgacttagccaaggcttacaacatcatcaagaaacagaaaaacgacttgaagcagggcaacaacaacttactcgaacaaaacatacagctgacgaacgaaaacaacagcttacagaacgacaaattcgagttagaaaagcttttagcgacgcttctaagtccaaagtcttggaacgatactacactcacttccgtcaaacaaaaactcaagcaaatcatgcaaaaggattagactaccaaggaccaattctgggacattcccgaggacgctcaaggtagttatgctagaatgattaagccgtccgtggcaactcctacgtaaaggaggtggcaacatggcacatatactcctctcagcagttttgagccttctgggttccttgataactgcactgttcgctgattggcttcgtcggcgaaaatagtttttgacggcatgaagcgcaaattaaaagccactcaactattcgcactagttgggtggcttttttgcaacgtggcaatatacttctctcggttaaattataacatggttgttccagaagtgcattaggtaggcggtttgtccccccccatgggttttggcttcgaaaatcaatcgttgaagtgaccagcgaagctcagctgatggagccctcatattcaagaagcaggtcaacgaatgccaattccaacatgagggccatgacttaggccactgatactcgcaaatgactgtcacaccaacggtattagccattctgataagcgagtctaacgacttttgacgcataatcgaccacctaccttattttcaaagcgcctcagagctaattagagtattcttcaaggagcttagcgaggattatagacgcttggcggacttcactttcggcttgattgacccgtttagcgatcttgtcatcatggcgagccaccttttccaagtcatggagattatcagcgatttggtcagtcatgacggagtagttcttaatacccgacagcaggctttcaacgttagtattctcaaggttttcgttgaatatcatggttattcctccttatcctcaaacttagtcatcttctgtctcctgttttagagaattttcaatcatgtctaataatgttgacatgtcaatgttaaatgaatcaaggctaccataccgcttgatttgagttttaacactatccaatccatattcttcaagtaatgcttttaatttaccagtaactttttcacctaaatgcccaaaatactgaagccagctcttaagtaattctcggtactggtcaaatttttctttttcagtaagctgtttctcaacttcttcttggtcctcagaaccgttaactactttccagaggtcagggtcagtagtacccaacttataaccaagtacccgatcatatgctctggccttttcctttggagtcaaatcaggattaaggtcaatattatctagcttcatacgttggtcagcataacgacctttttcaaagtcatcggcattcttggcttcaggttgccaagtgaactcatagccaacaacaggacgtcctctaccagctcctcgaatagtttttacggttaagccacgaataacaggggttagctcttctttaattggacgtaacactctttttcttacgttaccctggtctttcttgtagctcttgggtagatctagttgcttaaataattcgtcactggttaacttcaaccgccctactgttcgatattgtttaattaacactctttttcttacgttaccctggtctttcttgtagctcttgggtagatctagttgcttaaataattcgtcactggttaacttcaaccgccctactgttcgatattgtttaatcaagcgaaacatgttcttagcataagcagattgaagactattaaactgagctagttgaaatcttgtccaatgacttaaatcattgaatagcttctgaaatagagggttaacttgaacagtcagaatctgtttactcctctgaatctgaaatacattccaacaagcaaattgagtaatggtgtctccatcatcggtgtaggcattaatctctaatagctttttattagttttcatcaaatcttttacaaaattagatgtactccgttcatacttactaagactttgtagttgcgtaaatgaaaactttaatttctgagtacccttttgatacgactgctgaactagtgtaataaatagatttagctcattagagttcagtcggccaagtggaatagtattaagccgattactatacttcacaatttcattactcaattttctcacctcaaatatattataacattttatcgtacacaatcaagagtacgtacttatagcacacgtacagtattagcgcgtatattaagacaaaaatttagacaaaatgtaccttataacggacaaaatgtaccttataaaccggacaaaatgtaccttataacggacaaaatgtaccttataaaaaacgaaactcttactctcccaaggagtttcaaacccctaaagagtatttaaagaatatatataaagatatttaaagaggcaccatacggaaaatctcctttctgatttcaatttcagagaggagattatcactaaatttcaaaattcaatttttcgccaaaaacttttttagtagttttcggtaactagcaaaatcaacttcgttgattattttgactatttcgaaattcatcaaaaactgaatgcccgtctttatagtgaatttgtttagtgaagttcactaactgcttcagcatattcagttgaccacgtaaccattgttcactatcagcaggactaatttgttctgataattgctctttttggtggttataagccttataagcctgatatttagcataaccttgtgggtcatctgatttagccactctagccactttaggtacttttctaagccccttagcttgagcttgaatatcttctaaaaccgcccctttttcgatgagacgcttatttcgttgctttctcttttcagtattgatgcgagccatttgacgctctcgacgagccttaaacactgcttccttttcttgaaggcgttcaagttctgctttcattttttcaatatcagccataacaaatcctcctaatgtgaataatgttttctgaaattcaaatgttatctagattatatgatgttacaattgatttaaccactacgtttggtctccctgttaagggcgcacttatacacattcaaagaatgtaattacgcctgacggcgacgtgcgctctccgaggggacttacccagtcggggcgacttcatcgagaccatgtcatggagattcagtttcaccgaaacggaccactaaccccgtggaggggagaagtttcacttctagggaccattccatggagggtcgctttttacaaaagcaacgcaaaacaaaagactagctcccaagcttacgcaaggtcgttagtccctaaggaggcagcacaga
